(19) United States
(12) Patent Application Publication
(10) Pub. No.: US 2024/0309404 A1
(43) Pub. Date: Sep. 19, 2024

(54) BASE EDITING ENZYMES

(71) Applicant: Metagenomi, Inc., Emeryville, CA (US)

(72) Inventors: Brian C. THOMAS, Berkeley, CA (US); Jyun-Liang LIN, Emeryville, CA (US); Alan BROOKS, Clayton, CA (US); Cristina BUTTERFIELD, Oakland, CA (US); Christopher BROWN, Albany, CA (US); Cindy CASTELLE, San Francisco, CA (US); Morayma TEMOCHE-DIAZ, Oakland, CA (US); Benjamin FREEMAN, Emeryville, CA (US); Christine ROMANO, Emeryville, CA (US); Rebecca LAMOTHE, Albany, CA (US)

(21) Appl. No.: 18/653,454

(22) Filed: May 2, 2024

Related U.S. Application Data
(63) Continuation of application No. PCT/US2022/079345, filed on Nov. 4, 2022.
(60) Provisional application No. 63/276,461, filed on Nov. 5, 2021.
(60) Provisional application No. 63/289,998, filed on Dec. 15, 2021.
(60) Provisional application No. 63/342,824, filed on May 17, 2022.
(60) Provisional application No. 63/356,888, filed on Jun. 29, 2022.
(60) Provisional application No. 63/378,171, filed on Oct. 3, 2022.

(51) Int. Cl. C12N 15/90; C12N 9/22; C12N 9/78; C12N 15/11

(52) U.S. Cl. CPC C12N 15/90; C12N 9/22; C12N 9/78; C12N 15/11; C12Y 305/04; C12Y 305/04002; C12Y 305/04004; C12Y 305/04005; C12N 2310/20

(57) ABSTRACT

The present disclosure provides for endonuclease enzymes having distinguishing domain features, as well as methods of using such enzymes or variants thereof.

### CROSS-REFERENCE

[0001] This application is a continuation of International Application No. PCT/US2022/079345, filed on Nov. 4, 2022, which claims the benefit of U.S. Provisional Application Nos.: 63/276,461, filed on Nov. 5, 2021; 63/289,998, filed on Dec. 15, 2021; 63/342,824, filed on May 17, 2022; 63/356,888, filed on Jun. 29, 2022; and 63/378,171, filed on Oct. 3, 2022; each of which is entitled “BASE EDITING ENZYMES” and is incorporated herein by reference in its entirety. This application is related to PCT Patent Application No. PCT/US2021/049962, which is incorporated by reference herein in its entirety.

### BACKGROUND

[0002] Cas enzymes along with their associated Clustered Regularly Interspaced Short Palindromic Repeats (CRISPR) guide ribonucleic acids (RNAs) appear to be a pervasive (˜45% of bacteria, ˜84% of archaea) component of prokaryotic immune systems, serving to protect such microorganisms against non-self nucleic acids, such as infectious viruses and plasmids by CRISPR-RNA guided nucleic acid cleavage. While the deoxyribonucleic acid (DNA) elements encoding CRISPR RNA elements may be relatively conserved in structure and length, their CRISPR-associated (Cas) proteins are highly diverse, containing a wide variety of nucleic acid-interacting domains. While CRISPR DNA elements have been observed as early as 1987, the programmable endonuclease cleavage ability of CRISPR complexes has only been recognized relatively recently, leading to the use of recombinant CRISPR systems in diverse DNA manipulation and gene editing applications.

### SEQUENCE LISTING

[0003] The instant application contains a Sequence Listing which has been submitted electronically in XML format and is hereby incorporated by reference in its entirety. The XML copy, created on Jun. 6, 2024, is named 55921-742.301v3.xml and is 2,368,638 bytes in size.

### SUMMARY

[0004] In some aspects, the present disclosure provides for a method of deaminating a cytosine residue in a eukaryotic nucleic acid sequence in a cell, comprising: contacting to said eukaryotic nucleic acid sequence a polypeptide with cytosine deaminase activity comprising a sequence having at least 80%, at least 81%, at least 82%, at least 83%, at least 84%, at least 85%, at least 86%, at least 87%, at least 88%, at least 89%, at least 90%, at least 91%, at least 92%, at least 93%, at least 94%, at least 95%, at least 96%, at least 97%, at least 98%, or at least 99% sequence identity to any one of SEQ ID NOs: 1-49, 444-447, 599-675, 744-835, 970-982, or a variant thereof. In some embodiments, said eukaryotic nucleic acid sequence is a mammalian, primate, or human nucleic acid sequence. In some embodiments, said cell is a mammalian, primate, or human cell. In some embodiments, said eukaryotic nucleic acid sequence comprises single-stranded DNA (ssDNA) or ribonucleic acid (RNA). In some embodiments, said polypeptide with cytosine deaminase activity comprises a sequence having at least 80%, at least 81%, at least 82%, at least 83%, at least 84%, at least 85%, at least 86%, at least 87%, at least 88%, at least 89%, at least 90%, at least 91%, at least 92%, at least 93%, at least 94%, at least 95%, at least 96%, at least 97%, at least 98%, or at least 99% sequence identity to any one of SEQ ID NOs: 809-811, 819, 826, 752, 777, 823, 668-671, 675, 650, 752, 774, 777, 806, 812, 816, 817, 818, 825, 827, 832, 970-982, or a variant thereof. In some embodiments, said polypeptide with cytosine deaminase activity comprises a sequence having at least 80%, at least 81%, at least 82%, at least 83%, at least 84%, at least 85%, at least 86%, at least 87%, at least 88%, at least 89%, at least 90%, at least 91%, at least 92%, at least 93%, at least 94%, at least 95%, at least 96%, at least 97%, at least 98%, or at least 99% sequence identity to any one of SEQ ID NOs: 808, 810-811, 819, 826, 752, 777, or 823, or a variant thereof. In some embodiments, said eukaryotic nucleic acid sequence comprises double-stranded DNA (dsDNA). In some embodiments, said polypeptide with cytosine deaminase activity comprises a sequence having at least 80%, at least 81%, at least 82%, at least 83%, at least 84%, at least 85%, at least 86%, at least 87%, at least 88%, at least 89%, at least 90%, at least 91%, at least 92%, at least 93%, at least 94%, at least 95%, at least 96%, at least 97%, at least 98%, or at least 99% sequence identity to any one of SEQ ID NOs: 810-811. In some embodiments, said polypeptide with cytosine deaminase activity further comprises a nucleic acid binding domain, an endonuclease, or a nickase. In some embodiments, said polypeptide with cytosine deaminase activity further comprises said endonuclease or said nickase, wherein said endonuclease or said nickase comprises a sequence having at least 80%, at least 81%, at least 82%, at least 83%, at least 84%, at least 85%, at least 86%, at least 87%, at least 88%, at least 89%, at least 90%, at least 91%, at least 92%, at least 93%, at least 94%, at least 95%, at least 96%, at least 97%, at least 98%, or at least 99% sequence identity to any one of SEQ ID NOs: 70-78, 596, 597, 1120, 1122-1127, 1647, or a variant thereof. In some embodiments, said polypeptide with cytosine deaminase activity further comprises a nickase, wherein said nickase comprises an aspartate to alanine mutation at residue 9 relative to SEQ ID NO: 70, residue 13 relative to SEQ ID NOs: 71, 72, or 74, residue 12 relative to SEQ ID NO: 73, residue 17 relative to SEQ ID NO: 75, residue 23 relative to SEQ ID NO: 76, or residue 10 relative to SEQ ID NO: 597, or any combination thereof. In some embodiments, said polypeptide with cytosine deaminase activity further comprises a uracil DNA glycosylase inhibitor sequence. In some embodiments, said uracil DNA glycosylase inhibitor comprises a sequence with at least 80%, at least 81%, at least 82%, at least 83%, at least 84%, at least 85%, at least 86%, at least 87%, at least 88%, at least 89%, at least 90%, at least 91%, at least 92%, at least 93%, at least 94%, at least 95%, at least 96%, at least 97%, at least 98%, or at least 99% sequence identity to any one of SEQ ID NOs: 52-56 or SEQ ID NO: 67, or a variant thereof. In some embodiments, said polypeptide with cytosine deaminase activity further comprises a FAM72A sequence. In some embodiments, said FAM72A sequence has at least 80%, at least 81%, at least 82%, at least 83%, at least 84%, at least 85%, at least 86%, at least 87%, at least 88%, at least 89%, at least 90%, at least 91%, at least 92%, at least 93%, at least 94%, at least 95%, at least 96%, at least 97%, at least 98%, or at least 99% sequence identity to SEQ ID NO: 1121, or a variant thereof.

[0005] In some aspects, the present disclosure provides for a method of deaminating a cytosine residue in a primate nucleic acid sequence in a cell, comprising: contacting to a primate nucleic acid sequence a polypeptide with cytosine deaminase activity comprising a sequence having at least 80%, at least 81%, at least 82%, at least 83%, at least 84%, at least 85%, at least 86%, at least 87%, at least 88%, at least 89%, at least 90%, at least 91%, at least 92%, at least 93%, at least 94%, at least 95%, at least 96%, at least 97%, at least 98%, or at least 99% sequence identity to any one of SEQ ID NOs: 599-638, 660-675, 828-835, or a variant thereof. In some embodiments, said eukaryotic nucleic acid sequence comprises double-stranded DNA (dsDNA), single-stranded DNA (ssDNA) or ribonucleic acid (RNA). In some embodiments, said polypeptide with cytosine deaminase activity further comprises a nucleic acid binding domain, an endonuclease, or a nickase. In some embodiments, said polypeptide with cytosine deaminase activity further comprises said endonuclease or said nickase, wherein said endonuclease or said nickase comprises a sequence having at least 80%, at least 81%, at least 82%, at least 83%, at least 84%, at least 85%, at least 86%, at least 87%, at least 88%, at least 89%, at least 90%, at least 91%, at least 92%, at least 93%, at least 94%, at least 95%, at least 96%, at least 97%, at least 98%, or at least 99% sequence identity to any one of SEQ ID NOs: 70-78, 596, 597, 1120, 1122-1127, 1647, or a variant thereof. In some embodiments, said polypeptide with cytosine deaminase activity further comprises a nickase, wherein said nickase comprises an aspartate to alanine mutation at residue 9 relative to SEQ ID NO: 70, residue 13 relative to SEQ ID NOs: 71, 72, or 74, residue 12 relative to SEQ ID NO: 73, residue 17 relative to SEQ ID NO: 75, residue 23 relative to SEQ ID NO: 76, or residue 10 relative to SEQ ID NO: 597, or any combination thereof. In some embodiments, said polypeptide with cytosine deaminase activity further comprises a uracil DNA glycosylase inhibitor sequence. In some embodiments, said uracil DNA glycosylase inhibitor comprises a sequence with at least 80%, at least 81%, at least 82%, at least 83%, at least 84%, at least 85%, at least 86%, at least 87%, at least 88%, at least 89%, at least 90%, at least 91%, at least 92%, at least 93%, at least 94%, at least 95%, at least 96%, at least 97%, at least 98%, or at least 99% sequence identity to any one of SEQ ID NOs: 52-56 or SEQ ID NO: 67, or a variant thereof. In some embodiments, said polypeptide with cytosine deaminase activity further comprises a FAM72A sequence. In some embodiments, said FAM72A sequence has at least 80%, at least 81%, at least 82%, at least 83%, at least 84%, at least 85%, at least 86%, at least 87%, at least 88%, at least 89%, at least 90%, at least 91%, at least 92%, at least 93%, at least 94%, at least 95%, at least 96%, at least 97%, at least 98%, or at least 99% sequence identity to SEQ ID NO: 1121, or a variant thereof.

[0006] In some aspects, the present disclosure provides for a nucleic acid comprising an engineered nucleic acid sequence optimized for expression in a mammalian organism, wherein said nucleic acid encodes a sequence having at least 80%, at least 81%, at least 82%, at least 83%, at least 84%, at least 85%, at least 86%, at least 87%, at least 88%, at least 89%, at least 90%, at least 91%, at least 92%, at least 93%, at least 94%, at least 95%, at least 96%, at least 97%, at least 98%, or at least 99% sequence identity to any one of SEQ ID NOs: 1-49, 444-447, 599-675, 744-835, 970-982, or a variant thereof. In some embodiments, said nucleic acid encodes a sequence having at least 80%, at least 81%, at least 82%, at least 83%, at least 84%, at least 85%, at least 86%, at least 87%, at least 88%, at least 89%, at least 90%, at least 91%, at least 92%, at least 93%, at least 94%, at least 95%, at least 96%, at least 97%, at least 98%, or at least 99% sequence identity to any one of SEQ ID NOs: 809-811, 819, 826, 752, 777, 823, 668-671, 675, 650, 752, 774, 777, 806, 812, 816, 817, 818, 825, 827, 832, 832, 970-982, or a variant thereof

[0007] In some aspects, the present disclosure provides for a nucleic acid encoding any of the polypeptides described herein.

[0008] In some aspects, the present disclosure provides for a vector comprising any of the nucleic acids described herein.

[0009] In some aspects, the present disclosure provides for a fusion polypeptide comprising: (a) a domain with cytosine deaminase activity comprising a sequence having at least 80%, at least 81%, at least 82%, at least 83%, at least 84%, at least 85%, at least 86%, at least 87%, at least 88%, at least 89%, at least 90%, at least 91%, at least 92%, at least 93%, at least 94%, at least 95%, at least 96%, at least 97%, at least 98%, or at least 99% sequence identity to any one of SEQ ID NOs: 1-49, 444-447, 599-675, 744-835, 970-982, or a variant thereof; and (b) a nucleic acid binding domain, an endonuclease domain, or a nickase domain. In some embodiments, said domain with cytosine deaminase activity comprises a sequence having at least 80%, at least 81%, at least 82%, at least 83%, at least 84%, at least 85%, at least 86%, at least 87%, at least 88%, at least 89%, at least 90%, at least 91%, at least 92%, at least 93%, at least 94%, at least 95%, at least 96%, at least 97%, at least 98%, or at least 99% sequence identity to any one of SEQ ID NOs: 809-811, 819, 826, 752, 777, 823, 668-671, 675, 650, 752, 774, 777, 806, 812, 816, 817, 818, 825, 827, 832, 832, 970-982, or a variant thereof. In some embodiments, said domain with cytosine deaminase activity comprises a sequence having at least 80%, at least 81%, at least 82%, at least 83%, at least 84%, at least 85%, at least 86%, at least 87%, at least 88%, at least 89%, at least 90%, at least 91%, at least 92%, at least 93%, at least 94%, at least 95%, at least 96%, at least 97%, at least 98%, or at least 99% sequence identity to any one of SEQ ID NOs: 809-811, 819, 826, 752, 777, 823, or a variant thereof. In some embodiments, said fusion polypeptide comprises said endonuclease domain or said nickase domain, wherein said endonuclease domain or said nickase domain comprises a sequence having at least 80%, at least 81%, at least 82%, at least 83%, at least 84%, at least 85%, at least 86%, at least 87%, at least 88%, at least 89%, at least 90%, at least 91%, at least 92%, at least 93%, at least 94%, at least 95%, at least 96%, at least 97%, at least 98%, or at least 99% sequence identity to any one of SEQ ID NOs: 70-78, 596, 597, Sequence Number: A598, SEQ ID NOs: 1120, 1122-1127, 1647, or a variant thereof. In some embodiments, said fusion protein comprises said nickase domain, wherein said nickase domain comprises an aspartate to alanine mutation at residue 9 relative to SEQ ID NO: 70, residue 13 relative to SEQ ID NOs: 71, 72, or 74, residue 12 relative to SEQ ID NO: 73, residue 17 relative to SEQ ID NO: 75, residue 23 relative to SEQ ID NO: 76, or residue 10 relative to SEQ ID NO: 597, or any combination thereof. In some embodiments, said fusion protein comprises a sequence having at least 80%, at least 81%, at least 82%, at least 83%, at least 84%, at least 85%, at least 86%, at least 87%, at least 88%, at least 89%, at least 90%, at least 91%, at least 92%, at least 93%, at least 94%, at least 95%, at least 96%, at least 97%, at least 98%, or at least 99% sequence identity to any one of SEQ ID NOs: 877-916 or 968-969, or a variant thereof.

[0010] In some aspects, the present disclosure provides for system comprising: (a) any of the fusion proteins (e.g. endonuclease-base editor or endonuclease-deaminase fusions); and (b) an engineered guide polynucleotide configured to form a complex with said endonuclease domain comprising: (i) a guide ribonucleic acid sequence configured to hybridize to a target deoxyribonucleic acid sequence; and (ii) a ribonucleic acid sequence configured to bind to said endonuclease domain. In some embodiments, said engineered guide polynucleotide further comprises a sequence having at least 80%, at least 81%, at least 82%, at least 83%, at least 84%, at least 85%, at least 86%, at least 87%, at least 88%, at least 89%, at least 90%, at least 91%, at least 92%, at least 93%, at least 94%, at least 95%, at least 96%, at least 97%, at least 98%, or at least 99% sequence identity to non-degenerate nucleotides of any one of SEQ ID NOs: 88-96, 917-931, 963-967, 1099-1105, or a variant thereof.

[0011] In some aspects, the present disclosure provides for a polypeptide with adenosine deaminase activity comprising: a sequence having at least 80%, at least 81%, at least 82%, at least 83%, at least 84%, at least 85%, at least 86%, at least 87%, at least 88%, at least 89%, at least 90%, at least 91%, at least 92%, at least 93%, at least 94%, at least 95%, at least 96%, at least 97%, at least 98%, or at least 99% sequence identity to any one of SEQ ID NOs: 50, 51, 385-443, 448-475, or a variant thereof, wherein said polypeptide comprises a substitution at least one of residues T2, D7, E10, M13, W24, G32, K38, G45, G51, A63, E66, R75, C91, G93, H97, A107, E108, D109, P110, H124, A126, H129, F150, or S165, or any combination thereof relative to SEQ ID NO: 50 when optimally aligned. In some embodiments, said substitution comprises T2X₁, D7X₁, E10X₁, M13X₄, W24X₁, G32X₁, K38X₂, G45X₂, G51X₅, A63X₇, E66X₅, E66X₂, R75H, C91R, G93X₆, H97X₆, H97X₅, A107X₅, E108X₂, D109N, P110H, H124X₆, A126X₂, H129R, H129N, F150P, F150S, S165X₅, or any combination thereof relative to SEQ ID NO: 50 or MG68-4 when optimally aligned, wherein X₁ is A or G; X₂ is D or E; X₃ is N or Q; X₄ is R or K; X₅ is I, L, M, or V; X₆ is F, Y, or W; and X₇ is S or T. In some embodiments, said polypeptide comprises a sequence having at least 80%, at least 81%, at least 82%, at least 83%, at least 84%, at least 85%, at least 86%, at least 87%, at least 88%, at least 89%, at least 90%, at least 91%, at least 92%, at least 93%, at least 94%, at least 95%, at least 96%, at least 97%, at least 98%, or at least 99% sequence identity to any one of SEQ ID NOs: 836-860, or a variant thereof. In some embodiments, said polypeptide comprises any one of SEQ ID NOs: 839, 841, 843, 844, 847, 848, 849, 850, 851, 852, 859, or a variant thereof. In some embodiments, said substitution comprises W24G, G51V, E108D, P110H, F150P, D7G, E10G, or H129N, or any combination thereof, relative to SEQ ID NO: 50 or MG68-4 when optimally aligned. In some embodiments, said polypeptide further comprises a nucleic acid binding domain, an endonuclease domain, or a nickase domain. In some embodiments, said polypeptide comprises said endonuclease domain or said nickase domain, wherein said endonuclease domain or said nickase domain comprises a sequence having at least 80%, at least 81%, at least 82%, at least 83%, at least 84%, at least 85%, at least 86%, at least 87%, at least 88%, at least 89%, at least 90%, at least 91%, at least 92%, at least 93%, at least 94%, at least 95%, at least 96%, at least 97%, at least 98%, or at least 99% sequence identity to any one of SEQ ID NOs: 70-78, 596, 597, Sequence Number: A598, SEQ ID NOs: 1120, 1122-1127, 1647, or a variant thereof. In some embodiments, said polypeptide comprises said nickase domain, wherein said nickase domain comprises an aspartate to alanine mutation at residue 9 relative to SEQ ID NO: 70, residue 13 relative to SEQ ID NOs: 71, 72, or 74, residue 12 relative to SEQ ID NO: 73, residue 17 relative to SEQ ID NO: 75, residue 23 relative to SEQ ID NO: 76, or residue 10 relative to SEQ ID NO: 597, or any combination thereof.

[0012] In some aspects, the present disclosure provides for a system comprising: (a) any of the polypeptides or fusion polypeptides described herein; and (b) an engineered guide polynucleotide configured to form a complex with said endonuclease domain comprising: (i) a guide ribonucleic acid sequence configured to hybridize to a target deoxyribonucleic acid sequence; and (ii) a ribonucleic acid sequence configured to bind to said endonuclease domain. In some embodiments, said engineered guide polynucleotide further comprises a sequence having at least 80%, at least 81%, at least 82%, at least 83%, at least 84%, at least 85%, at least 86%, at least 87%, at least 88%, at least 89%, at least 90%, at least 91%, at least 92%, at least 93%, at least 94%, at least 95%, at least 96%, at least 97%, at least 98%, or at least 99% sequence identity to non-degenerate nucleotides of any one of SEQ ID NOs: 88-96, 917-931, 963-967, 1099-1105, or a variant thereof;

[0013] In some aspects, the present disclosure provides for a method of deaminating a cytosine residue in a cell, comprising introducing to said cell: (a) a vector encoding a polypeptide with cytosine deaminase activity; and (b) a vector encoding a FAM72A protein. In some embodiments, said vector encoding said FAM72A protein comprises a sequence having at least 80%, at least 81%, at least 82%, at least 83%, at least 84%, at least 85%, at least 86%, at least 87%, at least 88%, at least 89%, at least 90%, at least 91%, at least 92%, at least 93%, at least 94%, at least 95%, at least 96%, at least 97%, at least 98%, or at least 99% sequence identity to SEQ ID NO: 1115, or a variant thereof, or encodes a sequence having at least 80%, at least 81%, at least 82%, at least 83%, at least 84%, at least 85%, at least 86%, at least 87%, at least 88%, at least 89%, at least 90%, at least 91%, at least 92%, at least 93%, at least 94%, at least 95%, at least 96%, at least 97%, at least 98%, or at least 99% sequence identity to SEQ ID NO: 1121, or a variant thereof. In some embodiments, said polypeptide with cytosine deaminase activity comprises a sequence having at least 80%, at least 81%, at least 82%, at least 83%, at least 84%, at least 85%, at least 86%, at least 87%, at least 88%, at least 89%, at least 90%, at least 91%, at least 92%, at least 93%, at least 94%, at least 95%, at least 96%, at least 97%, at least 98%, or at least 99% sequence identity to any one of SEQ ID NOs: 1-49, 444-447, 599-675, 744-835, 970-982, or a variant thereof. In some embodiments, said polypeptide with cytosine deaminase activity further comprises a nucleic acid binding domain, an endonuclease domain, or a nickase domain. In some embodiments, said polypeptide with cytosine deaminase activity comprises said endonuclease domain or said nickase domain, wherein said endonuclease domain or said nickase domain comprises a sequence having at least 80%, at least 81%, at least 82%, at least 83%, at least 84%, at least 85%, at least 86%, at least 87%, at least 88%, at least 89%, at least 90%, at least 91%, at least 92%, at least 93%, at least 94%, at least 95%, at least 96%, at least 97%, at least 98%, or at least 99% sequence identity to any one of SEQ ID NOs: 70-78, 596, 597, Sequence Number: A598, SEQ ID NOs: 1120, 1122-1127, 1647, or a variant thereof. In some embodiments, said polypeptide with cytosine deaminase activity comprises said nickase domain, wherein said nickase domain comprises an aspartate to alanine mutation at residue 9 relative to SEQ ID NO: 70, residue 13 relative to SEQ ID NOs: 71, 72, or 74, residue 12 relative to SEQ ID NO: 73, residue 17 relative to SEQ ID NO: 75, residue 23 relative to SEQ ID NO: 76, or residue 10 relative to SEQ ID NO: 597, or any combination thereof.

[0014] In some aspects, the present disclosure provides for an engineered nucleic acid editing polypeptide, comprising (i) a sequence with cytosine deaminase activity; and (ii) a sequence derived from a FAM72A protein. In some embodiments, said sequence with cytosine deaminase activity has at least 80%, at least 81%, at least 82%, at least 83%, at least 84%, at least 85%, at least 86%, at least 87%, at least 88%, at least 89%, at least 90%, at least 91%, at least 92%, at least 93%, at least 94%, at least 95%, at least 96%, at least 97%, at least 98%, or at least 99% sequence identity to any one of SEQ ID NOs: 1-49, 444-447, 599-675, 744-835, 970-982, or a variant thereof. In some embodiments, said sequence derived from said FAM72A protein has at least 80%, at least 81%, at least 82%, at least 83%, at least 84%, at least 85%, at least 86%, at least 87%, at least 88%, at least 89%, at least 90%, at least 91%, at least 92%, at least 93%, at least 94%, at least 95%, at least 96%, at least 97%, at least 98%, or at least 99% sequence identity to SEQ ID NO: 1121, or a variant thereof. In some embodiments, the polypeptide further comprises an endonuclease sequence comprising a RuvC domain and an HNH domain, wherein said endonuclease sequence is a sequence of a class 2, type II endonuclease. In some embodiments, said RuvC domain lacks nuclease activity. In some embodiments, said endonuclease comprises a nickase. In some embodiments, said class 2, type II endonuclease sequence has at least 80%, at least 81%, at least 82%, at least 83%, at least 84%, at least 85%, at least 86%, at least 87%, at least 88%, at least 89%, at least 90%, at least 91%, at least 92%, at least 93%, at least 94%, at least 95%, at least 96%, at least 97%, at least 98%, or at least 99% sequence identity to any one of SEQ ID NOs: 70-78, 596, 597, Sequence Number: A598, SEQ ID NOs: 1120, 1122-1127, 1647, or a variant thereof. In some embodiments, said class 2, type II endonuclease comprises an aspartate to alanine mutation at residue 9 relative to SEQ ID NO: 70, residue 13 relative to SEQ ID NOs: 71, 72, or 74, residue 12 relative to SEQ ID NO: 73, residue 17 relative to SEQ ID NO: 75, residue 23 relative to SEQ ID NO: 76, or residue 10 relative to SEQ ID NO: 597 when optimally aligned.

[0015] In some aspects, the present disclosure provides for a method of editing a cytosine residue to a thymine residue in a cell, comprising contacting to said cell any of the cytosine deaminase fusion polypeptides described herein. In some embodiments, said cell is a prokaryotic, eukaryotic, mammalian, primate, or human cell.

[0016] In some aspects, the present disclosure provides for an engineered nucleic acid editing polypeptide, comprising: a plurality of domains derived from a Class 2, Type II endonuclease, wherein said domains comprise RUVC-I, REC, HNH, RUVC-III, and WED domains; and a domain comprising a base editor sequence, wherein said base editor sequence is inserted: (a) within said RUVC-I domain; (b) within said REC domain; (c) within said HNH domain; (d) within said RUV-CIII domain; (e) within said WED domain; (f) prior to said HNH domain; (g) prior to said RUV-CIII domain; or (h) between said RUVC-III and said WED domain. In some embodiments, said Class 2, Type II endonuclease comprises a sequence having at least 80%, at least 81%, at least 82%, at least 83%, at least 84%, at least 85%, at least 86%, at least 87%, at least 88%, at least 89%, at least 90%, at least 91%, at least 92%, at least 93%, at least 94%, at least 95%, at least 96%, at least 97%, at least 98%, or at least 99% sequence identity to any one of SEQ ID NOs: 70-78, 596, 597, Sequence Number: A598, SEQ ID NOs: 1120, 1122-1127, 1647, or a variant thereof. In some embodiments, said Class 2, Type II endonuclease comprises a sequence having at least 80% sequence identity to SEQ ID NO: 1647, or a variant thereof. In some embodiments, said base editor sequence comprises a deaminase sequence. In some embodiments, said deaminase sequence has at least 80%, at least 81%, at least 82%, at least 83%, at least 84%, at least 85%, at least 86%, at least 87%, at least 88%, at least 89%, at least 90%, at least 91%, at least 92%, at least 93%, at least 94%, at least 95%, at least 96%, at least 97%, at least 98%, or at least 99% sequence identity to any one of SEQ ID NOs: 1-49, 444-447, 599-675, 744-835, 970-982, 50, 51, 385-443, 448-475, or a variant thereof. In some embodiments, said deaminase sequence has at least 80%, at least 81%, at least 82%, at least 83%, at least 84%, at least 85%, at least 86%, at least 87%, at least 88%, at least 89%, at least 90%, at least 91%, at least 92%, at least 93%, at least 94%, at least 95%, at least 96%, at least 97%, at least 98%, or at least 99% sequence identity to any one of SEQ ID NOs: 1-49, 444-447, 599-675, 744-835, 970-982, or a variant thereof. In some embodiments, said deaminase sequence has at least 80%, at least 81%, at least 82%, at least 83%, at least 84%, at least 85%, at least 86%, at least 87%, at least 88%, at least 89%, at least 90%, at least 91%, at least 92%, at least 93%, at least 94%, at least 95%, at least 96%, at least 97%, at least 98%, or at least 99% sequence identity to any one of SEQ ID NOs: 50, 51, 385-443, 448-475, or a variant thereof. In some embodiments, said deaminase has at least 80% sequence identity to SEQ ID NO: 386, or a variant thereof. In some embodiments, said deaminase sequence comprises a substitution of one of residues T2, D7, E10, M13, W24, G32, K38, G45, G51, A63, E66, R75, C91, G93, H97, A107, E108, D109, P110, H124, A126, H129, F150, or S165, or any combination thereof relative to SEQ ID NO: 50 or MG68-4 when optimally aligned. In some embodiments, said engineered nucleic acid editing polypeptide comprises a sequence having at least 80%, at least 81%, at least 82%, at least 83%, at least 84%, at least 85%, at least 86%, at least 87%, at least 88%, at least 89%, at least 90%, at least 91%, at least 92%, at least 93%, at least 94%, at least 95%, at least 96%, at least 97%, at least 98%, or at least 99% sequence identity to any one of SEQ ID NOs: 1128-1160, or a variant thereof. In some embodiments, said engineered nucleic acid editing polypeptide comprises a sequence having at least 80%, at least 81%, at least 82%, at least 83%, at least 84%, at least 85%, at least 86%, at least 87%, at least 88%, at least 89%, at least 90%, at least 91%, at least 92%, at least 93%, at least 94%, at least 95%, at least 96%, at least 97%, at least 98%, or at least 99% sequence identity to any one of SEQ ID NOs: 1137, 1140, 1142, 1143, 1146, 1149, 1151-1158, or a variant thereof. In some embodiments, said engineered nucleic acid editing polypeptide comprises a sequence having at least 80%, at least 81%, at least 82%, at least 83%, at least 84%, at least 85%, at least 86%, at least 87%, at least 88%, at least 89%, at least 90%, at least 91%, at least 92%, at least 93%, at least 94%, at least 95%, at least 96%, at least 97%, at least 98%, or at least 99% sequence identity to any one of SEQ ID NOs: 1139,1152,1158, or a variant thereof.

[0017] In some aspects, the present disclosure provides for polypeptide with adenosine deaminase activity comprising: a sequence having at least 80%, at least 81%, at least 82%, at least 83%, at least 84%, at least 85%, at least 86%, at least 87%, at least 88%, at least 89%, at least 90%, at least 91%, at least 92%, at least 93%, at least 94%, at least 95%, at least 96%, at least 97%, at least 98%, or at least 99% sequence identity to any one of SEQ ID NOs: 50, 51, 385-443, 448-475, or a variant thereof, wherein said polypeptide comprises a substitution of a wild-type residue for a non-wild-type residue at residue 109 and one other residue comprising any one of 24, 37, 49, 52, 83, 85, 107, 110, 112, 120, 123, 124, 147, 148, 150, 156, 157, 158, 166, 167, or 129, or any combination thereof relative to SEQ ID NO: 386 when optimally aligned. In some embodiments, said sequence has at least 80%, at least 81%, at least 82%, at least 83%, at least 84%, at least 85%, at least 86%, at least 87%, at least 88%, at least 89%, at least 90%, at least 91%, at least 92%, at least 93%, at least 94%, at least 95%, at least 96%, at least 97%, at least 98%, or at least 99% sequence identity to SEQ ID NO: 386. In some embodiments, the polypeptide comprises a substitution of 109N and at least one other substitution comprising any one of 24R, 37L, 49A, 52L, 83S, 85F, 107V, 110S, 112R, 120N, 123N, 124Y, 147C, 148Y, 148R, 150Y, 156V, 157F, 158N, 1661, or 129N, or any combination thereof relative to SEQ ID NO: 386 when optimally aligned. In some embodiments, the peptide comprises any of the substitutions depicted in FIG. 34B. In some embodiments, said polypeptide has at least 80% sequence identity to any one of SEQ ID NOs: 1161-1183, or a variant thereof. In some embodiments, said polypeptide has at least 80%, at least 81%, at least 82%, at least 83%, at least 84%, at least 85%, at least 86%, at least 87%, at least 88%, at least 89%, at least 90%, at least 91%, at least 92%, at least 93%, at least 94%, at least 95%, at least 96%, at least 97%, at least 98%, or at least 99% sequence identity to any one of SEQ ID NOs: 1170, 1179, or 1166, or a variant thereof. In some embodiments, said polypeptide further comprises an endonuclease or a nickase. In some embodiments, said polypeptide comprises said endonuclease or said nickase, wherein said endonuclease or said nickase comprises a sequence having at least 80%, at least 81%, at least 82%, at least 83%, at least 84%, at least 85%, at least 86%, at least 87%, at least 88%, at least 89%, at least 90%, at least 91%, at least 92%, at least 93%, at least 94%, at least 95%, at least 96%, at least 97%, at least 98%, or at least 99% sequence identity to any one of SEQ ID NOs: 70-78, 596, 597, Sequence Number: A598, SEQ ID NOs: 1120, 1122-1127, 1647, or a variant thereof. In some embodiments, said polypeptide comprises said nickase, wherein said nickase comprises an aspartate to alanine mutation at residue 9 relative to SEQ ID NO: 70, residue 13 relative to SEQ ID NOs: 71, 72, or 74, residue 12 relative to SEQ ID NO: 73, residue 17 relative to SEQ ID NO: 75, residue 23 relative to SEQ ID NO: 76, or residue 10 relative to SEQ ID NO: 597, or any combination thereof

[0018] In some aspects, the present disclosure provides for a polypeptide with cytosine deaminase activity comprising: a sequence having at least 80%, at least 81%, at least 82%, at least 83%, at least 84%, at least 85%, at least 86%, at least 87%, at least 88%, at least 89%, at least 90%, at least 91%, at least 92%, at least 93%, at least 94%, at least 95%, at least 96%, at least 97%, at least 98%, or at least 99% sequence identity to any one of SEQ ID NOs: 1-49, 444-447, 599-675, 744-835, 970-982, or a variant thereof; wherein said polypeptide comprises at least one of the alterations described in Table 12C. In some embodiments, said polypeptide has at least one substitution of a wild-type amino acid for a non-wild-type amino acid comprising any one of W90A, W90F, W90H, W90Y, Y120F, Y120H, Y121F, Y121H, Y121Q, Y121A, Y121D, Y121W, H122Y, H122F, H1221, H122A, H122W, H122D, Y121T, R33A, R34A, R34K, H122A, R33A, R34A, R52A, N57G, H122A, E123A, E123Q, W127F, W127H, W127Q, W127A, W127D, R39A, K40A, H128A, N63G, R58A, H121F, H121Y, H121Q, H121A, H121D, H121W, R33A, K34A, H122A, H121A, R52A, P26R, P26A, N27R, N27A, W44A, W45A, K49G, S50G, R51G, R121A, I122A, N123A, Y88F, Y120F, P22R, P22A, K23A, K41R, K41A, E54A, E54A, E55A, K30A, K30R, M32A, M32K, Y117A, K118A, 1119A, 1119H, R120A, R121A, P46A, P46R, N29A, R27A, or N50G, or any combination thereof, optionally relative to an APOBEC polypeptide. In some embodiments, the polypeptide comprises a sequence having at least 80%, at least 81%, at least 82%, at least 83%, at least 84%, at least 85%, at least 86%, at least 87%, at least 88%, at least 89%, at least 90%, at least 91%, at least 92%, at least 93%, at least 94%, at least 95%, at least 96%, at least 97%, at least 98%, or at least 99% sequence identity to any one of SEQ ID NOs: 1208-1315, or a variant thereof

[0019] In some aspects, the present disclosure provides for a polypeptide with cytosine deaminase activity comprising: a cytosine deaminase sequence having at least 80%, at least 81%, at least 82%, at least 83%, at least 84%, at least 85%, at least 86%, at least 87%, at least 88%, at least 89%, at least 90%, at least 91%, at least 92%, at least 93%, at least 94%, at least 95%, at least 96%, at least 97%, at least 98%, or at least 99% sequence identity to any one of SEQ ID NOs: 835, 1275, 668, 774, 818, 671, 667, 650, 827, 819, 823, 814, 813, 817, 628, 826, 1223, 834, 618, 621, 669, 833, 830, or a variant thereof; and an endonuclease or a nickase. In some embodiments, said endonuclease or said nickase comprises a sequence having at least 80% identity to any one of SEQ ID NOs: 70-78, 596, 597, Sequence Number: A598, SEQ ID NOs: 1120, or 1122-1127, 1647, or a variant thereof. In some embodiments, said polypeptide comprises said nickase, wherein said nickase comprises an aspartate to alanine mutation at residue 9 relative to SEQ ID NO: 70, residue 13 relative to SEQ ID NOs: 71, 72, or 74, residue 12 relative to SEQ ID NO: 73, residue 17 relative to SEQ ID NO: 75, residue 23 relative to SEQ ID NO: 76, or residue 10 relative to SEQ ID NO: 597, or any combination thereof. In some embodiments, said cytosine deaminase sequence has at least 80% sequence identity to any one of SEQ ID NOs: 1275, 835, or 774, or a combination thereof.

[0020] In some aspects, the present disclosure provides for a polypeptide with adenosine deaminase activity comprising: a sequence having at least 80%, at least 81%, at least 82%, at least 83%, at least 84%, at least 85%, at least 86%, at least 87%, at least 88%, at least 89%, at least 90%, at least 91%, at least 92%, at least 93%, at least 94%, at least 95%, at least 96%, at least 97%, at least 98%, or at least 99% sequence identity to any one of SEQ ID NOs: 50, 51, 385-443, 448-475, 1015-1098, or a variant thereof, wherein said polypeptide comprises any of the combinations of substitutions of a wild-type residue for a non-wild-type residue recited in Table 12D. In some embodiments, said polypeptide has at least 80%, at least 81%, at least 82%, at least 83%, at least 84%, at least 85%, at least 86%, at least 87%, at least 88%, at least 89%, at least 90%, at least 91%, at least 92%, at least 93%, at least 94%, at least 95%, at least 96%, at least 97%, at least 98%, or at least 99% sequence identity to any one of SEQ ID NOs: 1556-1638, or a variant thereof. In some embodiments, said polypeptide further comprises an endonuclease or a nickase. In some embodiments, said polypeptide comprises said endonuclease or said nickase, wherein said endonuclease or said nickase comprises a sequence having at least 80%, at least 81%, at least 82%, at least 83%, at least 84%, at least 85%, at least 86%, at least 87%, at least 88%, at least 89%, at least 90%, at least 91%, at least 92%, at least 93%, at least 94%, at least 95%, at least 96%, at least 97%, at least 98%, or at least 99% sequence identity to any one of SEQ ID NOs: 70-78, 596, 597, Sequence Number: A598, SEQ ID NOs: 1120, or 1122-1127, 1647, or a variant thereof. In some embodiments, said polypeptide comprises said nickase, wherein said nickase comprises an aspartate to alanine mutation at residue 9 relative to SEQ ID NO: 70, residue 13 relative to SEQ ID NOs: 71, 72, or 74, residue 12 relative to SEQ ID NO: 73, residue 17 relative to SEQ ID NO: 75, residue 23 relative to SEQ ID NO: 76, or residue 10 relative to SEQ ID NO: 597, or any combination thereof

[0021] In some aspects, the present disclosure provides for a polypeptide with adenosine deaminase activity comprising: a sequence having at least 80%, at least 81%, at least 82%, at least 83%, at least 84%, at least 85%, at least 86%, at least 87%, at least 88%, at least 89%, at least 90%, at least 91%, at least 92%, at least 93%, at least 94%, at least 95%, at least 96%, at least 97%, at least 98%, or at least 99% sequence identity to any one of SEQ ID NOs: 50, 51, 385-443, 448-475, 1015-1098, or a variant thereof, wherein said polypeptide comprises any of the combinations of substitutions of a wild-type residue for a non-wild-type residue recited in Table 13. In some embodiments, said sequence has at least 80%, at least 81%, at least 82%, at least 83%, at least 84%, at least 85%, at least 86%, at least 87%, at least 88%, at least 89%, at least 90%, at least 91%, at least 92%, at least 93%, at least 94%, at least 95%, at least 96%, at least 97%, at least 98%, or at least 99% sequence identity to SEQ ID NO: 386, or a variant thereof. In some embodiments, said polypeptide further comprises an endonuclease or a nickase. In some embodiments, said polypeptide comprises said endonuclease or said nickase, wherein said endonuclease or said nickase comprises a sequence having at least 80%, at least 81%, at least 82%, at least 83%, at least 84%, at least 85%, at least 86%, at least 87%, at least 88%, at least 89%, at least 90%, at least 91%, at least 92%, at least 93%, at least 94%, at least 95%, at least 96%, at least 97%, at least 98%, or at least 99% sequence identity to any one of SEQ ID NOs: 70-78, 596, 597, Sequence Number: A598, SEQ ID NOs: 1120, or 1122-1127, 1647, or a variant thereof. In some embodiments, said polypeptide comprises said nickase, wherein said nickase comprises an aspartate to alanine mutation at residue 9 relative to SEQ ID NO: 70, residue 13 relative to SEQ ID NOs: 71, 72, or 74, residue 12 relative to SEQ ID NO: 73, residue 17 relative to SEQ ID NO: 75, residue 23 relative to SEQ ID NO: 76, or residue 10 relative to SEQ ID NO: 597, or any combination thereof.

[0022] In some aspects, the present disclosure provides for a method of editing an APOA1 locus in a cell, comprising contacting to said cell (a) an RNA-guided endonuclease; and (b) an engineered guide nucleic acid structure, wherein said engineered guide nucleic acid structure is configured to form a complex with said endonuclease and said engineered guide nucleic acid structure comprises a spacer sequence configured to hybridize to a region of said APOA1 locus, wherein said engineered guide nucleic acid structure comprises a targeting sequence having at least 80%, at least 81%, at least 82%, at least 83%, at least 84%, at least 85%, at least 86%, at least 87%, at least 88%, at least 89%, at least 90%, at least 91%, at least 92%, at least 93%, at least 94%, at least 95%, at least 96%, at least 97%, at least 98%, or at least 99% sequence identity to at least 18, 19, 20, 21, 22, 23, 24, 25, or 26 consecutive nucleotides of any one of SEQ ID NOs: 1455-1478 or a reverse complement thereof. In some embodiments, said engineered guide nucleic acid structure has at least 80%, at least 81%, at least 82%, at least 83%, at least 84%, at least 85%, at least 86%, at least 87%, at least 88%, at least 89%, at least 90%, at least 91%, at least 92%, at least 93%, at least 94%, at least 95%, at least 96%, at least 97%, at least 98%, or at least 99% sequence identity to any one of SEQ ID NOs: 1431-1454. In some embodiments, said engineered guide nucleic acid structure comprises any of the nucleotide modifications recited in Table 13A. In some embodiments, said RNA-guided endonuclease is a class 2, type II endonuclease. In some embodiments, said RNA-guided endonuclease has at least 80%, at least 81%, at least 82%, at least 83%, at least 84%, at least 85%, at least 86%, at least 87%, at least 88%, at least 89%, at least 90%, at least 91%, at least 92%, at least 93%, at least 94%, at least 95%, at least 96%, at least 97%, at least 98%, or at least 99% sequence identity to any one of SEQ ID NOs: 70-78, 596, 597, Sequence Number: A598, SEQ ID NOs: 1120, 1122-1127, 1647, or a variant thereof.

[0023] In some aspects, the present disclosure provides for a method of editing an ANGPTL3 locus in a cell, comprising contacting to said cell (a) an RNA-guided endonuclease; and (b) an engineered guide nucleic acid structure, wherein said engineered guide nucleic acid structure is configured to form a complex with said endonuclease and said engineered guide nucleic acid structure comprises a spacer sequence configured to hybridize to a region of said ANGPTL3 locus, wherein said engineered guide nucleic acid structure comprises a targeting sequence having at least 80%, at least 81%, at least 82%, at least 83%, at least 84%, at least 85%, at least 86%, at least 87%, at least 88%, at least 89%, at least 90%, at least 91%, at least 92%, at least 93%, at least 94%, at least 95%, at least 96%, at least 97%, at least 98%, or at least 99% sequence identity to at least 18, 19, 20, 21, 22, 23, 24, 25, or 26 consecutive nucleotides of any one of SEQ ID NOs: 1484-1488 or a reverse complement thereof. In some embodiments, said engineered guide nucleic acid structure has at least 80% identity to any one of SEQ ID NOs: 1479-1483. In some embodiments, said engineered guide nucleic acid structure comprises any of the nucleotide modifications recited in Table 13A. In some embodiments, said RNA-guided endonuclease is a class 2, type II endonuclease. In some embodiments, said RNA-guided endonuclease has at least 80%, at least 81%, at least 82%, at least 83%, at least 84%, at least 85%, at least 86%, at least 87%, at least 88%, at least 89%, at least 90%, at least 91%, at least 92%, at least 93%, at least 94%, at least 95%, at least 96%, at least 97%, at least 98%, or at least 99% sequence identity to any one of SEQ ID NOs: 70-78, 596, 597, Sequence Number: A598, SEQ ID NOs: 1120, 1122-1127, 1647, or a variant thereof.

[0024] In some aspects, the present disclosure provides for a method of editing a TRAC locus in a cell, comprising contacting to said cell (a) an RNA-guided endonuclease; and (b) an engineered guide nucleic acid structure, wherein said engineered guide nucleic acid structure is configured to form a complex with said endonuclease and said engineered guide nucleic acid structure comprises a spacer sequence configured to hybridize to a region of said TRAC locus, wherein said engineered guide nucleic acid structure comprises a targeting sequence having at least 80%, at least 81%, at least 82%, at least 83%, at least 84%, at least 85%, at least 86%, at least 87%, at least 88%, at least 89%, at least 90%, at least 91%, at least 92%, at least 93%, at least 94%, at least 95%, at least 96%, at least 97%, at least 98%, or at least 99% sequence identity to at least 18, 19, 20, 21, 22, 23, 24, 25, or 26 consecutive nucleotides of any one of SEQ ID NOs: 1491-1492 or a reverse complement thereof. In some embodiments, said engineered guide nucleic acid structure has at least 80%, at least 81%, at least 82%, at least 83%, at least 84%, at least 85%, at least 86%, at least 87%, at least 88%, at least 89%, at least 90%, at least 91%, at least 92%, at least 93%, at least 94%, at least 95%, at least 96%, at least 97%, at least 98%, or at least 99% sequence identity to any one of SEQ ID NOs: 1489-1490. In some embodiments, aid engineered guide nucleic acid structure comprises any of the nucleotide modifications recited in Table 13A. In some embodiments, said RNA-guided endonuclease is a class 2, type II endonuclease. In some embodiments, said RNA-guided endonuclease has at least 80%, at least 81%, at least 82%, at least 83%, at least 84%, at least 85%, at least 86%, at least 87%, at least 88%, at least 89%, at least 90%, at least 91%, at least 92%, at least 93%, at least 94%, at least 95%, at least 96%, at least 97%, at least 98%, or at least 99% sequence identity to any one of SEQ ID NOs: 70-78, 596, 597, Sequence Number: A598, SEQ ID NOs: 1120, 1122-1127, 1647, or a variant thereof.

[0025] In some aspects, the present disclosure provides for an engineered adenosine base editor polypeptide, wherein said polypeptide comprises a sequence having at least 80%, at least 81%, at least 82%, at least 83%, at least 84%, at least 85%, at least 86%, at least 87%, at least 88%, at least 89%, at least 90%, at least 91%, at least 92%, at least 93%, at least 94%, at least 95%, at least 96%, at least 97%, at least 98%, or at least 99% sequence identity to any one of SEQ ID NOs: 1647-1653.

[0026] In some aspects, the present disclosure provides for a method of deaminating a cytosine residue in a eukaryotic nucleic acid sequence in a cell, comprising: contacting to said eukaryotic nucleic acid sequence a polypeptide with cytosine deaminase activity comprising a sequence having at least at least 80%, at least 81%, at least 82%, at least 83%, at least 84%, at least 85%, at least 86%, at least 87%, at least 88%, at least 89%, at least 90%, at least 91%, at least 92%, at least 93%, at least 94%, at least 95%, at least 96%, at least 97%, at least 98%, or at least 99% sequence identity to any one of SEQ ID NOs: 1-49, 444-447, 599-675, 744-835, 970-982, or a variant thereof. In some embodiments, said eukaryotic nucleic acid sequence is a mammalian, primate, or human nucleic acid sequence. In some embodiments, said cell is a mammalian, primate, or human cell. In some embodiments, said eukaryotic nucleic acid sequence comprises single-stranded DNA (ssDNA) or ribonucleic acid (RNA). In some embodiments, said polypeptide with cytosine deaminase activity comprises a sequence having at least 80%, at least 81%, at least 82%, at least 83%, at least 84%, at least 85%, at least 86%, at least 87%, at least 88%, at least 89%, at least 90%, at least 91%, at least 92%, at least 93%, at least 94%, at least 95%, at least 96%, at least 97%, at least 98%, or at least 99% sequence identity to any one of SEQ ID NOs: 809-811, 819, 826, 752, 777, 823, 668-671, 675, 650, 752, 774, 777, 806, 812, 816, 817, 818, 825, 827, 832, 970-982, or a variant thereof. In some embodiments, said polypeptide with cytosine deaminase activity comprises a sequence having at least 80% identity to any one of SEQ ID NOs: 808, 810-811, 819, 826, 752, 777, or 823, or a variant thereof. In some embodiments, said eukaryotic nucleic acid sequence comprises double-stranded DNA (dsDNA). In some embodiments, said polypeptide with cytosine deaminase activity comprises a sequence having at least 80% identity to any one of SEQ ID NOs: 810-811. In some embodiments, said polypeptide with cytosine deaminase activity further comprises a nucleic acid binding domain, an endonuclease, or a nickase. In some embodiments, said polypeptide with cytosine deaminase activity further comprises said endonuclease or said nickase, wherein said endonuclease or said nickase comprises a sequence having at least 80%, at least 810%, at least 82%, at least 83%, at least 84%, at least 85%, at least 86%, at least 87%, at least 88%, at least 89%, at least 90%, at least 91%, at least 92%, at least 93%, at least 94%, at least 95%, at least 96%, at least 97%, at least 98%, or at least 99% sequence identity to any one of SEQ ID NOs: 70-78, 596, 597, 1120, or 1122-1127, or a variant thereof. In some embodiments, said polypeptide with cytosine deaminase activity further comprises a nickase, wherein said nickase comprises an aspartate to alanine mutation at residue 9 relative to SEQ ID NO: 70, residue 13 relative to SEQ ID NOs: 71, 72, or 74, residue 12 relative to SEQ ID NO: 73, residue 17 relative to SEQ ID NO: 75, residue 23 relative to SEQ ID NO: 76, or residue 10 relative to SEQ ID NO: 597, or any combination thereof. In some embodiments, said polypeptide with cytosine deaminase activity further comprises a uracil DNA glycosylase inhibitor sequence. In some embodiments, said uracil DNA glycosylase inhibitor comprises a sequence with at least 70%, at least 80%, at least 81%, at least 82%, at least 83%, at least 84%, at least 85%, at least 86%, at least 87%, at least 88%, at least 89%, at least 90%, at least 91%, at least 92%, at least 93%, at least 94%, at least 95%, at least 96%, at least 97%, at least 98%, or at least 99% sequence identity to any one of SEQ ID NOs: 52-56 or SEQ ID NO: 67, or a variant thereof. In some embodiments, said polypeptide with cytosine deaminase activity further comprises a FAM72A sequence. In some embodiments, said FAM72A sequence has at least 80%, at least 81%, at least 82%, at least 83%, at least 84%, at least 85%, at least 86%, at least 87%, at least 88%, at least 89%, at least 90%, at least 91%, at least 92%, at least 93%, at least 94%, at least 95%, at least 96%, at least 97%, at least 98%, or at least 99% sequence identity to SEQ ID NO: 1121, or a variant thereof.

[0027] In some aspects, the present disclosure provides for a method of deaminating a cytosine residue in a primate nucleic acid sequence in a cell, comprising: contacting to said primate nucleic acid sequence a polypeptide with cytosine deaminase activity comprising a sequence having at least 80%, at least 81%, at least 82%, at least 83%, at least 84%, at least 85%, at least 86%, at least 87%, at least 88%, at least 89%, at least 90%, at least 91%, at least 92%, at least 93%, at least 94%, at least 95%, at least 96%, at least 97%, at least 98%, or at least 99% sequence identity to any one of SEQ ID NOs: 599-638, 660-675, or 828-835, or a variant thereof. In some embodiments, said eukaryotic nucleic acid sequence comprises double-stranded DNA (dsDNA), single-stranded DNA (ssDNA) or ribonucleic acid (RNA). In some embodiments, said polypeptide with cytosine deaminase activity further comprises a nucleic acid binding domain, an endonuclease, or a nickase. In some embodiments, said polypeptide with cytosine deaminase activity further comprises said endonuclease or said nickase, wherein said endonuclease or said nickase comprises a sequence having at least 80%, at least 81%, at least 82%, at least 83%, at least 84%, at least 85%, at least 86%, at least 87%, at least 88%, at least 89%, at least 90%, at least 91%, at least 92%, at least 93%, at least 94%, at least 95%, at least 96%, at least 97%, at least 98%, or at least 99% sequence identity identity to any one of SEQ ID NOs: 70-78, 596, 597, 1120, or 1122-1127, or a variant thereof. In some embodiments, said polypeptide with cytosine deaminase activity further comprises a nickase, wherein said nickase comprises an aspartate to alanine mutation at residue 9 relative to SEQ ID NO: 70, residue 13 relative to SEQ ID NOs: 71, 72, or 74, residue 12 relative to SEQ ID NO: 73, residue 17 relative to SEQ ID NO: 75, residue 23 relative to SEQ ID NO: 76, or residue 10 relative to SEQ ID NO: 597, or any combination thereof. In some embodiments, said polypeptide with cytosine deaminase activity further comprises a uracil DNA glycosylase inhibitor sequence. In some embodiments, said uracil DNA glycosylase inhibitor comprises a sequence with at least 70%, at least 80%, at least 81%, at least 82%, at least 83%, at least 84%, at least 85%, at least 86%, at least 87%, at least 88%, at least 89%, at least 90%, at least 91%, at least 92%, at least 93%, at least 94%, at least 95%, at least 96%, at least 97%, at least 98%, or at least 99% sequence identity to any one of SEQ ID NOs: 52-56 or SEQ ID NO: 67, or a variant thereof. In some embodiments, said polypeptide with cytosine deaminase activity further comprises a FAM72A sequence. In some embodiments, said FAM72A sequence has at least 80%, at least 81%, at least 82%, at least 83%, at least 84%, at least 85%, at least 86%, at least 87%, at least 88%, at least 89%, at least 90%, at least 91%, at least 92%, at least 93%, at least 94%, at least 95%, at least 96%, at least 97%, at least 98%, or at least 99% sequence identity to SEQ ID NO: 1121, or a variant thereof.

[0028] In some aspects, the present disclosure provides for a nucleic acid comprising an engineered nucleic acid sequence optimized for expression in a mammalian organism, wherein said nucleic acid encodes a sequence having at least 70%, at least 80%, at least 81%, at least 82%, at least 83%, at least 84%, at least 85%, at least 86%, at least 87%, at least 88%, at least 89%, at least 90%, at least 91%, at least 92%, at least 93%, at least 94%, at least 95%, at least 96%, at least 97%, at least 98%, or at least 99% sequence identity to any one of SEQ ID NOs: 1-49, 444-447, 599-675, 744-835, 970-982, or a variant thereof. In some embodiments, said nucleic acid encodes a sequence having at least 80%, at least 81%, at least 82%, at least 83%, at least 84%, at least 85%, at least 86%, at least 87%, at least 88%, at least 89%, at least 90%, at least 91%, at least 92%, at least 93%, at least 94%, at least 95%, at least 96%, at least 97%, at least 98%, or at least 99% sequence identity to any one of SEQ ID NOs: 809-811, 819, 826, 752, 777, 823, 668-671, 675, 650, 752, 774, 777, 806, 812, 816, 817, 818, 825, 827, 832, 832, 970-982, or a variant thereof.

[0029] In some aspects, the present disclosure provides for a vector comprising any of the nucleic acids described herein. In some embodiments, the vector is a non-viral or a viral vector. In some embodiments the vector is a plasmid, minicircle, or plasmid vector. In some embodiments, the viral vector is an AAV vector.

[0030] In some aspects, the present disclosure provides for a fusion polypeptide comprising: (a) a domain with cytosine deaminase activity comprising a sequence having at least 80% identity to any one of SEQ ID NOs: 1-49, 444-447, 599-675, 744-835, 970-982, or a variant thereof; and (b) a nucleic acid binding domain, an endonuclease domain, or a nickase domain. In some embodiments, said domain with cytosine deaminase activity comprises a sequence having at least 80%, at least 81%, at least 82%, at least 83%, at least 84%, at least 85%, at least 86%, at least 87%, at least 88%, at least 89%, at least 90%, at least 91%, at least 92%, at least 93%, at least 94%, at least 95%, at least 96%, at least 97%, at least 98%, or at least 99% sequence identity to any one of SEQ ID NOs: 809-811, 819, 826, 752, 777, 823, 668-671, 675, 650, 752, 774, 777, 806, 812, 816, 817, 818, 825, 827, 832, 832, 970-982, or a variant thereof. In some embodiments, said domain with cytosine deaminase activity comprises a sequence having at least 80%, at least 81%, at least 82%, at least 83%, at least 84%, at least 85%, at least 86%, at least 87%, at least 88%, at least 89%, at least 90%, at least 91%, at least 92%, at least 93%, at least 94%, at least 95%, at least 96%, at least 97%, at least 98%, or at least 99% sequence identity to any one of SEQ ID NOs: 809-811, 819, 826, 752, 777, 823, or a variant thereof. In some embodiments, said fusion polypeptide comprises said endonuclease domain or said nickase domain, wherein said endonuclease domain or said nickase domain comprises a sequence having at least 80%, at least 81%, at least 82%, at least 83%, at least 84%, at least 85%, at least 86%, at least 87%, at least 88%, at least 89%, at least 90%, at least 91%, at least 92%, at least 93%, at least 94%, at least 95%, at least 96%, at least 97%, at least 98%, or at least 99% sequence identity to any one of SEQ ID NOs: 70-78, 596, 597, Sequence Number: A598, SEQ ID NOs: 1120, or 1122-1127, or a variant thereof. In some embodiments, said fusion protein comprises said nickase domain, wherein said nickase domain comprises an aspartate to alanine mutation at residue 9 relative to SEQ ID NO: 70, residue 13 relative to SEQ ID NOs: 71, 72, or 74, residue 12 relative to SEQ ID NO: 73, residue 17 relative to SEQ ID NO: 75, residue 23 relative to SEQ ID NO: 76, or residue 10 relative to SEQ ID NO: 597, or any combination thereof. In some embodiments, said fusion protein comprises a sequence having at least 80%, at least 81%, at least 82%, at least 83%, at least 84%, at least 85%, at least 86%, at least 87%, at least 88%, at least 89%, at least 90%, at least 91%, at least 92%, at least 93%, at least 94%, at least 95%, at least 96%, at least 97%, at least 98%, or at least 99% sequence identity to any one of SEQ ID NOs: 877-916 or 968-969, or a variant thereof.

[0031] In some aspects, the present disclosure provides for a system comprising: (a) any of the the fusion polypeptides described herein; and (b) an engineered guide polynucleotide configured to form a complex with said endonuclease domain comprising: (i) a guide ribonucleic acid sequence configured to hybridize to a target deoxyribonucleic acid sequence; and (ii) a ribonucleic acid sequence configured to bind to said endonuclease domain. In some embodiments, said engineered guide polynucleotide further comprises a sequence having at least 80%, at least 81%, at least 82%, at least 83%, at least 84%, at least 85%, at least 86%, at least 87%, at least 88%, at least 89%, at least 90%, at least 91%, at least 92%, at least 93%, at least 94%, at least 95%, at least 96%, at least 97%, at least 98%, or at least 99% sequence identity to non-degenerate nucleotides of any one of SEQ ID NOs: 88-96, 917-931, 963-967, or 1099-1105, or a variant thereof.

[0032] In some aspects, the present disclosure provides for a polypeptide with adenosine deaminase activity comprising: a sequence having at least 80%, at least 81%, at least 82%, at least 83%, at least 84%, at least 85%, at least 86%, at least 87%, at least 88%, at least 89%, at least 90%, at least 91%, at least 92%, at least 93%, at least 94%, at least 95%, at least 96%, at least 97%, at least 98%, or at least 99% sequence identity to any one of SEQ ID NOs: 50, 51, 385-443, 448-475, or a variant thereof, wherein said polypeptide comprises a substitution at least one of residues T2, D7, E10, M13, W24, G32, K38, G45, G51, A63, E66, R75, C91, G93, H97, A107, E108, D109, P110, H124, A126, H129, F150, or S165, or any combination thereof relative to SEQ ID NO: 50 when optimally aligned. In some embodiments, said substitution comprises T2X₁, D7X₁, E10X₁, M13X₄, W24X₁, G32X₁, K38X₂, G45X₂, G51X₅, A63X₇, E66X₅, E66X₂, R75H, C91R, G93X₆, H97X₆, H97X₅, A107X₅, E108X₂, D109N, P110H, H124X₆, A126X₂, H129R, H129N, F150P, F150S, S165X₅, or any combination thereof relative to SEQ ID NO: 50 when optimally aligned, wherein X₁ is A or G; X₂ is D or E; X₃ is N or Q; X₄ is R or K; X₅ is I, L, M, or V; X₆ is F, Y, or W; and X₇ is S or T. In some embodiments, said polypeptide comprises a sequence having at least 80%, at least 81%, at least 82%, at least 83%, at least 84%, at least 85%, at least 86%, at least 87%, at least 88%, at least 89%, at least 90%, at least 91%, at least 92%, at least 93%, at least 94%, at least 95%, at least 96%, at least 97%, at least 98%, or at least 99% sequence identity any one of SEQ ID NOs. 836-860, or a variant thereof. In some embodiments, said polypeptide comprises any one of SEQ ID NOs: 839, 841, 843, 844, 847, 848, 849, 850, 851, 852, or 859. In some embodiments, said substitution comprises W24G, G51V, E108D, P110H, F150P, D7G, E10G, or H129N, or any combination thereof, relative to SEQ ID NO: 50 when optimally aligned. In some embodiments, said polypeptide further comprises a nucleic acid binding domain, an endonuclease domain, or a nickase domain. In some embodiments, said polypeptide comprises said endonuclease domain or said nickase domain, wherein said endonuclease domain or said nickase domain comprises a sequence having at least 80%, at least 81%, at least 82%, at least 83%, at least 84%, at least 85%, at least 86%, at least 87%, at least 88%, at least 89%, at least 90%, at least 91%, at least 92%, at least 93%, at least 94%, at least 95%, at least 96%, at least 97%, at least 98%, or at least 99% sequence identity to any one of SEQ ID NOs: 70-78, 596, 597, Sequence Number: A598, SEQ ID NOs: 1120, or 1122-1127, or a variant thereof. In some embodiments, said polypeptide comprises said nickase domain, wherein said nickase domain comprises an aspartate to alanine mutation at residue 9 relative to SEQ ID NO: 70, residue 13 relative to SEQ ID NOs: 71, 72, or 74, residue 12 relative to SEQ ID NO: 73, residue 17 relative to SEQ ID NO: 75, residue 23 relative to SEQ ID NO: 76, or residue 10 relative to SEQ ID NO: 597, or any combination thereof.

[0033] In some aspects, the present disclosure provides for a system comprising: (a) any of the polypeptides for base editor fusions described herein (e.g. endonuclease deaminase fusions); and (b) an engineered guide polynucleotide configured to form a complex with said endonuclease domain comprising: (i) a guide ribonucleic acid sequence configured to hybridize to a target deoxyribonucleic acid sequence; and (ii) a ribonucleic acid sequence configured to bind to said endonuclease domain. In some embodiments, said engineered guide polynucleotide further comprises a sequence having at least 80%, at least 81%, at least 82%, at least 83%, at least 84%, at least 85%, at least 86%, at least 87%, at least 88%, at least 89%, at least 90%, at least 91%, at least 92%, at least 93%, at least 94%, at least 95%, at least 96%, at least 97%, at least 98%, or at least 99% sequence identity to non-degenerate nucleotides of any one of SEQ ID NOs: 88-96, 917-931, 963-967, or 1099-1105.

[0034] In some aspects, the present disclosure provides for a method of deaminating a cytosine residue in a cell, comprising introducing to said cell: (a) a vector encoding a polypeptide with cytosine deaminase activity; and (b) a vector encoding a FAM72A protein. In some embodiments, said vector encoding said FAM72A protein comprises a sequence having at least 80% identity to SEQ ID NO: 1115, or encodes a sequence having at least 80% identity to SEQ ID NO: 1121. In some embodiments, said polypeptide with cytosine deaminase activity comprises a sequence having at least 80% identity to any one of SEQ ID NOs: 1-49, 444-447, 599-675, 744-835, 970-982, or a variant thereof. In some embodiments, said polypeptide with cytosine deaminase activity further comprises a nucleic acid binding domain, an endonuclease domain, or a nickase domain. In some embodiments, said polypeptide with cytosine deaminase activity comprises said endonuclease domain or said nickase domain, wherein said endonuclease domain or said nickase domain comprises a sequence having at least 80% identity to any one of SEQ ID NOs: 70-78, 596, 597, Sequence Number: A598, SEQ ID NOs: 1120, or 1122-1127, or a variant thereof. In some embodiments, said polypeptide with cytosine deaminase activity comprises said nickase domain, wherein said nickase domain comprises an aspartate to alanine mutation at residue 9 relative to SEQ ID NO: 70, residue 13 relative to SEQ ID NOs: 71, 72, or 74, residue 12 relative to SEQ ID NO: 73, residue 17 relative to SEQ ID NO: 75, residue 23 relative to SEQ ID NO: 76, or residue 10 relative to SEQ ID NO: 597, or any combination thereof.

[0035] In some aspects, the present disclosure provides for an engineered nucleic acid editing system, comprising: an endonuclease comprising a RuvC domain and an HNH domain, wherein said endonuclease is derived from an uncultivated microorganism, wherein said endonuclease is a class 2, type II endonuclease, wherein said endonuclease is configured to be deficient in nuclease activity; a base editor coupled to said endonuclease; and an engineered guide ribonucleic acid structure configured to form a complex with said endonuclease comprising: a guide ribonucleic acid sequence configured to hybridize to a target deoxyribonucleic acid sequence; and a ribonucleic acid sequence configured to bind to said endonuclease. In some embodiments, said RuvC domain lacks nuclease activity. In some embodiments, said class 2, type II endonuclease comprises a nickase mutation. In some embodiments, said class 2, type II endonuclease comprises the aspartate to alanine mutation at residue 9 relative to SEQ ID NO: 70, residue 13 relative to SEQ ID NOs: 71, 72, or 74, residue 12 relative to SEQ ID NO: 73, residue 17 relative to SEQ ID NO: 75, residue 23 relative to SEQ ID NO: 76, or residue 10 relative to SEQ ID NO: 597 when optimally aligned. In some embodiments, said endonuclease comprises an aspartate to alanine mutation at residue 9 relative to SEQ ID NO: 70, residue 13 relative to SEQ ID NO: 72, or residue 17 relative to SEQ ID NO: 75 when optimally aligned. In some embodiments, said endonuclease comprises a sequence with at least 95% sequence identity to any one of SEQ ID NOs:70-78 or 597, or a variant thereof. In some aspects, the present disclosure provides for an engineered nucleic acid editing system comprising: an endonuclease having at least 95% sequence identity to any one of SEQ ID NOs:70-78 or 597, or a variant thereof; a base editor coupled to said endonuclease; and an engineered guide ribonucleic acid structure configured to form a complex with said endonuclease comprising: a guide ribonucleic acid sequence configured to hybridize to a target deoxyribonucleic acid sequence; and a ribonucleic acid sequence configured to bind to said endonuclease. In some aspects, the present disclosure provides for an engineered nucleic acid editing system comprising: an endonuclease configured to bind to a protospacer adjacent motif (PAM) sequence comprising any one of Sequence Numbers: A360-A368 or A598, or a variant thereof, wherein said endonuclease is a class 2, type II endonuclease, and wherein said endonuclease is configured to be deficient in nuclease activity; a base editor coupled to said endonuclease; and an engineered guide ribonucleic acid structure configured to form a complex with said endonuclease comprising: a guide ribonucleic acid sequence configured to hybridize to a target deoxyribonucleic acid sequence; and a ribonucleic acid sequence configured to bind to said endonuclease. In some embodiments, said endonuclease comprises a nickase mutation. In some embodiments, said endonuclease is configured to cleave one strand of a double-stranded target deoxyribonucleic acid. In some embodiments, said class 2, type II endonuclease comprises an aspartate to alanine mutation at residue 9 relative to SEQ ID NO: 70, residue 13 relative to SEQ ID NOs: 71, 72, or 74, residue 12 relative to SEQ ID NO: 73, residue 17 relative to SEQ ID NO: 75, residue 23 relative to SEQ ID NO: 76, or residue 10 relative to SEQ ID NO: 597 when optimally aligned. In some embodiments, said base editor comprises a sequence having at least 70%, 80%, 90% or 95% identity to any one of SEQ ID NOs: 1-51, 57-66, 385-443, 444-475, 594-595, or 599-675, or a variant thereof. In some embodiments, said base editor comprises a sequence having at least 70%, 80%, 90% or 95% identity to any one of SEQ ID NOs: 50-51 or 385-390. In some embodiments, said RuvC domain lacks nuclease activity. In some embodiments, said endonuclease is derived from an uncultivated microorganism. In some embodiments, said endonuclease has less than 80% identity to a Cas9 endonuclease. In some embodiments, said endonuclease further comprises an HNH domain. In some embodiments, said engineered guide ribonucleic acid sequence comprises a sequence with at least 80% sequence identity to non-degenerate nucleotides of any one of SEQ ID NOs: 88-96, 488-489, or 679-680, or a variant thereof. In some aspects, the present disclosure provides for an engineered nucleic acid editing system comprising, an engineered guide ribonucleic acid structure comprising: a guide ribonucleic acid sequence configured to hybridize to a target deoxyribonucleic acid sequence; and a ribonucleic acid sequence configured to bind to an endonuclease, wherein said engineered ribonucleic acid sequence comprises a sequence with at least 80% sequence identity to non-degenerate nucleotides of any one of SEQ ID NOs: 88-96, 488-489, or 679-680, or a variant thereof; a class 2, type II endonuclease configured to bind to said engineered guide ribonucleic acid; and a base editor coupled to said endonuclease. In some embodiments, said base editor comprises a sequence having at least 70%, 80%, 90% or 95% identity to any one of SEQ ID NOs: 50-51 or 385-390. In some embodiments, said endonuclease is configured to bind to a protospacer adjacent motif (PAM) sequence selected from the group consisting of Sequence Numbers: A360-A368 or A598. In some embodiments, said base editor comprises a sequence with at least 70%, 80%, 90% or 95% identity to any one of SEQ ID NOs: 1-51, 57-66, 385-443, 444-475, 594-595, or 599-675, or a variant thereof. In some embodiments, said base editor is an adenine deaminase. In some embodiments, said adenosine deaminase comprises a sequence with at least 70%, 80%, 90% or 95% identity to any one of SEQ ID NOs: 50-51, 57, 385-443, 448-475, or 595, or a variant thereof. In some embodiments, said base editor is a cytosine deaminase. In some embodiments, said cytosine deaminase comprises a sequence with at least 70%, 80%, 90% or 95% identity to any one of SEQ ID NOs: 1-49, 444-447, 594, or 58-66, or a variant thereof. In some embodiments, the system further comprises a uracil DNA glycosylase inhibitor coupled to said endonuclease or said base editor. In some embodiments, said uracil DNA glycosylase inhibitor comprises a sequence with at least 70%, 80%, 90% or 95% identity to any one of SEQ ID NOs: 52-56 or SEQ ID NO: 67. In some embodiments, said engineered guide ribonucleic acid structure comprises at least two ribonucleic acid polynucleotides. In some embodiments, said engineered guide ribonucleic acid structure comprises one ribonucleic acid polynucleotide comprising said guide ribonucleic acid sequence and said tracr ribonucleic acid sequence. In some embodiments, said guide ribonucleic acid sequence is complementary to a prokaryotic, bacterial, archaeal, eukaryotic, fungal, plant, mammalian, or human genomic sequence. In some embodiments, said guide ribonucleic acid sequence is 15-24 nucleotides in length. In some embodiments, said endonuclease comprises one or more nuclear localization sequences (NLSs) proximal to an N- or C-terminus of said endonuclease. In some embodiments, said NLS comprises a sequence with at least 90% identity to a selected from SEQ ID NOs: 369-384, or a variant thereof. In some embodiments, said endonuclease is covalently coupled directly to said base editor or covalently coupled to said base editor through a linker. In some embodiments, said endonuclease comprises an aspartate to alanine mutation at residue 9 relative to SEQ ID NO: 70, residue 13 relative to SEQ ID NOs: 71, 72, or 74, residue 12 relative to SEQ ID NO: 73 or 78, residue 17 relative to SEQ ID NO: 75, residue 23 relative to SEQ ID NO: 76, residue 8 relative to SEQ ID NO: 77, or residue 10 relative to SEQ ID NO: 597 when optimally aligned. In some embodiments, said endonuclease comprises an aspartate to alanine mutation at residue 9 relative to SEQ ID NO: 70, residue 13 relative to SEQ ID NO: 72, or residue 17 relative to SEQ ID NO: 75 when optimally aligned. In some embodiments, a polypeptide comprises said endonuclease and said base editor. In some embodiments, said endonuclease is configured to cleave one strand of a double-stranded target deoxyribonucleic acid. In some embodiments, said system further comprises a source of Mg²⁺. In some embodiments: (a) said endonuclease comprises a sequence at least 70%, at least 80%, or at least 90% identical to any one of SEQ ID NOs: 70, 71, 73, 74, 76, 78, 77, or 78, or a variant thereof; (b) said guide RNA structure comprises a sequence at least 70%, at least 80%, or at least 90% identical to non-degenerate nucleotides of any one of SEQ ID NOs: 88, 89, 91, 92, 94, 96, 95, or 488; (c) said endonuclease is configured to bind to a PAM comprising any one of Sequence Numbers: A360, A361, A363, A365, A367, or A368; or (d) said base editor comprises a sequence at least 70%, at least 80%, or at least 90% identical to SEQ ID NOs: 58 or 595, or a variant thereof. In some embodiments: (a) said endonuclease comprises a sequence at least 70%, at least 80%, or at least 90% identical to any one of SEQ ID NOs: 70, 71, or 78, or a variant thereof; (b) said guide RNA structure comprises a sequence at least 70%, at least 80%, or at least 90% identical to non-degenerate nucleotides of at least one of SEQ ID NOs: 88, 89, or 96; (c) said endonuclease is configured to bind to a PAM comprising any one of Sequence Numbers: A360, A362, or A368; or (d) said base editor comprises a sequence at least 70%, at least 80%, or at least 90% identical to SEQ ID NO: 594, or a variant thereof. In some embodiments, said sequence identity is determined by a BLASTP, CLUSTALW, MUSCLE, MAFFT, or Smith-Waterman homology search algorithm. In some embodiments, said sequence identity is determined by said BLASTP homology search algorithm using parameters of a wordlength (W) of 3, an expectation (E) of 10, and a BLOSUM62 scoring matrix setting gap costs at existence of 11, extension of 1, and using a conditional compositional score matrix adjustment. In some embodiments, said endonuclease is configured to be catalytically dead. In some embodiments, said endonuclease is configured to cleave one strand of a double-stranded target deoxyribonucleic acid.

[0036] In some aspects, the present disclosure provides for a nucleic acid comprising an engineered nucleic acid sequence optimized for expression in an organism, wherein said nucleic acid encodes a class 2, type II endonuclease coupled to a base editor, and wherein said endonuclease is derived from an uncultivated microorganism.

[0037] In some aspects, the present disclosure provides for a nucleic acid comprising an engineered nucleic acid sequence optimized for expression in an organism, wherein said nucleic acid encodes an endonuclease having at least 70% sequence identity to any one of SEQ ID NOs: 70-78 coupled to a base editor. In some embodiments, said endonuclease comprises a sequence encoding one or more nuclear localization sequences (NLSs) proximal to an N- or C-terminus of said endonuclease. In some embodiments, said NLS comprises a sequence with at least 90% identity to a selected from SEQ ID NOs: 369-384, or a variant thereof. In some embodiments, said organism is prokaryotic, bacterial, eukaryotic, fungal, plant, mammalian, rodent, or human.

[0038] In some aspects, the present disclosure provides for a vector comprising a nucleic acid sequence encoding a class 2, type II endonuclease coupled to a base editor, wherein said endonuclease is derived from an uncultivated microorganism.

[0039] In some aspects, the present disclosure provides for a vector comprising the nucleic acid of any of the aspects or embodiments described herein. In some embodiments, the vector further comprises a nucleic acid encoding an engineered guide ribonucleic acid structure configured to form a complex with said endonuclease comprising: a guide ribonucleic acid sequence configured to hybridize to a target deoxyribonucleic acid sequence; and a ribonucleic acid sequence configured to binding to said endonuclease. In some embodiments, the vector is a plasmid, a minicircle, a CELiD, an adeno-associated virus (AAV) derived virion, or a lentivirus.

[0040] In some aspects, the present disclosure provides for a cell comprising the vector of any of the aspects or embodiments described herein.

[0041] In some aspects, the present disclosure provides for a method of manufacturing an endonuclease, comprising cultivating the cell of any of the aspects or embodiments described herein.

[0042] In some aspects, the present disclosure provides for a method for modifying a double-stranded deoxyribonucleic acid polynucleotide comprising contacting said double-stranded deoxyribonucleic acid polynucleotide with a complex comprising: an endonuclease comprising a RuvC domain and an HNH domain, wherein said endonuclease is derived from an uncultivated microorganism, wherein said endonuclease is a class 2, type II endonuclease, and wherein the endonuclease is configured to be deficient in nuclease activity; a base editor coupled to said endonuclease; and an engineered guide ribonucleic acid structure configured to bind to said endonuclease and said double-stranded deoxyribonucleic acid polynucleotide; wherein said double-stranded deoxyribonucleic acid polynucleotide comprises a protospacer adjacent motif (PAM). In some embodiments, said endonuclease comprising a RuvC domain and an HNH domain is covalently coupled directly to said base editor or covalently coupled to said base editor through a linker. In some embodiments, said endonuclease comprising a RuvC domain and an HNH domain comprises a sequence with at least 95% sequence identity to any one of SEQ ID NOs:70-78 or 597, or a variant thereof.

[0043] In some aspects, the present disclosure provides for a method for modifying a double-stranded deoxyribonucleic acid polynucleotide, comprising contacting said double-stranded deoxyribonucleic acid polynucleotide with a complex comprising: a class 2, type II endonuclease, a base editor coupled to said endonuclease, and an engineered guide ribonucleic acid structure configured to bind to said endonuclease and said double-stranded deoxyribonucleic acid polynucleotide; wherein said double-stranded deoxyribonucleic acid polynucleotide comprises a protospacer adjacent motif (PAM); and wherein said PAM comprises a sequence selected from the group consisting of SEQ ID NOs: 70-78 or 597. In some embodiments, said class 2, type II endonuclease is covalently coupled to said base editor or coupled to said base editor through a linker. In some embodiments, said base editor comprises a sequence with at least 70%, at least 80%, at least 90% or at least 95% identity to a sequence selected from SEQ ID NOs: 1-51, 57-66, 385-443, 444-475, 594-595, or 599-675, or a variant thereof. In some embodiments, said base editor comprises an adenine deaminase; said double-stranded deoxyribonucleic acid polynucleotide comprises an adenine; and modifying said double-stranded deoxyribonucleic acid polypeptide comprises converting said adenine to guanine. In some embodiments, said adenine deaminase comprises a sequence with at least 70%, 80%, 90% or 95% sequence identity to any one of SEQ ID NOs: 50-51, 57, 385-443, 448-475, or 595, or a variant thereof. In some embodiments, said base editor comprises a cytosine deaminase; said double-stranded deoxyribonucleic acid polynucleotide comprises a cytosine; and modifying said double-stranded deoxyribonucleic acid polypeptide comprises converting said cytosine to uracil. In some embodiments, said cytosine deaminase comprises a sequence with at least 70%, 80%, 90% or 95% sequence identity to any one of SEQ ID NOs: 1-49, 444-447, 594, or 58-66, or a variant thereof. In some embodiments, said complex further comprises a uracil DNA glycosylase inhibitor coupled to said endonuclease or said base editor. In some embodiments, said uracil DNA glycosylase inhibitor comprises a sequence with at least 70%, 80%, 90% or 95% identity to any one of SEQ ID NOs: 52-56 or SEQ ID NO: 67, or a variant thereof. In some embodiments, said double-stranded deoxyribonucleic acid polynucleotide comprises a first strand comprising a sequence complementary to a sequence of said engineered guide ribonucleic acid structure and a second strand comprising said PAM. In some embodiments, said PAM is directly adjacent to the 3′ end of said sequence complementary to said sequence of said engineered guide ribonucleic acid structure. In some embodiments, said class 2, type II endonuclease is not a Cas9 endonuclease, a Cas14 endonuclease, a Cas12a endonuclease, a Cas12b endonuclease, a Cas 12c endonuclease, a Cas12d endonuclease, a Cas12e endonuclease, a Cas13a endonuclease, a Cas13b endonuclease, a Cas13c endonuclease, or a Cas 13d endonuclease. In some embodiments, said class 2, type II endonuclease is derived from an uncultivated microorganism. In some embodiments, said double-stranded deoxyribonucleic acid polynucleotide is a eukaryotic, plant, fungal, mammalian, rodent, or human double-stranded deoxyribonucleic acid polynucleotide.

[0044] In some aspects, the present disclosure provides for a method of modifying a target nucleic acid locus, said method comprising delivering to said target nucleic acid locus said engineered nucleic acid editing system of any of the aspects or embodiments described herein, wherein said endonuclease is configured to form a complex with said engineered guide ribonucleic acid structure, and wherein said complex is configured such that upon binding of said complex to said target nucleic acid locus, said complex modifies a nucleotide of said target nucleic locus. In some embodiments, said engineered nucleic acid editing system comprises an adenine deaminase, said nucleotide is an adenine, and modifying said target nucleic acid locus comprises converting said adenine to a guanine. In some embodiments, said engineered nucleic acid editing system comprises a cytidine deaminase and a uracil DNA glycosylase inhibitor, said nucleotide is a cytosine and modifying said target nucleic acid locus comprises converting said adenine to a uracil. In some embodiments, said target nucleic acid locus comprises genomic DNA, viral DNA, or bacterial DNA. In some embodiments, said target nucleic acid locus is in vitro. In some embodiments, said target nucleic acid locus is within a cell. In some embodiments, said cell is a prokaryotic cell, a bacterial cell, a eukaryotic cell, a fungal cell, a plant cell, an animal cell, a mammalian cell, a rodent cell, a primate cell, or a human cell. In some embodiments, said cell is within an animal. In some embodiments, said cell is within a cochlea. In some embodiments, said cell is within an embryo. In some embodiments, said embryo is a two-cell embryo. In some embodiments, said embryo is a mouse embryo. In some embodiments, delivering said engineered nucleic acid editing system to said target nucleic acid locus comprises delivering the nucleic acid of any of the aspects or embodiments described herein or the vector of any of the aspects or embodiments described herein. In some embodiments, delivering said engineered nucleic acid editing system to said target nucleic acid locus comprises delivering a nucleic acid comprising an open reading frame encoding said endonuclease. In some embodiments, said nucleic acid comprises a promoter to which said open reading frame encoding said endonuclease is operably linked. In some embodiments, delivering said engineered nucleic acid editing system to said target nucleic acid locus comprises delivering a capped mRNA containing said open reading frame encoding said endonuclease. In some embodiments, delivering said engineered nucleic acid editing system to said target nucleic acid locus comprises delivering a translated polypeptide. In some embodiments, delivering said engineered nucleic acid editing system to said target nucleic acid locus comprises delivering a deoxyribonucleic acid (DNA) encoding said engineered guide ribonucleic acid structure operably linked to a ribonucleic acid (RNA) pol III promoter.

[0045] In some aspects, the present disclosure provides for an engineered nucleic acid editing polypeptide, comprising: an endonuclease comprising a RuvC domain and an HNH domain, wherein said endonuclease is derived from an uncultivated microorganism, wherein said endonuclease is a class 2, type II endonuclease, and wherein the endonuclease is configured to be deficient in nuclease activity; and a base editor coupled to said endonuclease. In some embodiments, said endonuclease comprises a sequence with at least 95% sequence identity to any one of SEQ ID NOs:70-78 or 597, or a variant thereof.

[0046] In some aspects, the present disclosure provides for an engineered nucleic acid editing polypeptide, comprising: an endonuclease having at least 80%, at least 81%, at least 82%, at least 83%, at least 84%, at least 85%, at least 86%, at least 87%, at least 88%, at least 89%, at least 90%, at least 91%, at least 92%, at least 93%, at least 94%, at least 95%, at least 96%, at least 97%, at least 98%, at least 99%, or 100% sequence identity to any one of SEQ ID NOs:70-78 or 597, or a variant thereof, wherein the endonuclease is configured to be deficient in nuclease activity; and a base editor coupled to said endonuclease. In some aspects, the present disclosure provides for an engineered nucleic acid editing polypeptide, comprising: an endonuclease configured to bind to a protospacer adjacent motif (PAM) sequence comprising any one of Sequence Numbers: A360-A368 or A598, wherein said endonuclease is a class 2, type II endonuclease, and wherein the endonuclease is configured to be deficient in nuclease activity; and a base editor coupled to said endonuclease. In some embodiments, said endonuclease is derived from an uncultivated microorganism. In some embodiments, said endonuclease has less than 80% identity to a Cas9 endonuclease. In some embodiments, said endonuclease further comprises an HNH domain. In some embodiments, said tracr ribonucleic acid sequence comprises a sequence with at least 80% sequence identity to about 60 to 90 consecutive nucleotides selected from any one of SEQ ID NOs: 88-96, 488, 489, and 679-680. In some embodiments, said base editor comprises a sequence with at least 70%, 80%, 90% or 95% identity to any one of SEQ ID NOs: 1-51, 57-66, 385-443, 444-475, 594-595, or 599-675, or a variant thereof. In some embodiments, said base editor is an adenine deaminase. In some embodiments, said adenosine deaminase comprises a sequence with at least 70%, 80%, 90% or 95% sequence identity to any one of SEQ ID NOs: 50-51, 57, 385-443, 448-475, or 595, or a variant thereof. In some embodiments, said base editor is a cytosine deaminase. In some embodiments, said cytosine deaminase comprises a sequence with at least 70%, 80%, 90% or 95% sequence identity to any one of SEQ ID NOs: 1-49, 444-447, 594, or 58-66, or a variant thereof.

[0047] In some aspects, the present disclosure provides for an engineered nucleic acid editing polypeptide, comprising: an endonuclease, wherein said endonuclease is configured to be deficient in endonuclease activity; and a base editor coupled to said endonuclease, wherein said base editor comprises a sequence with at least 70%, 80%, 90% or 95% sequence identity to any one of SEQ ID NOs: 1-51, 385-386, 387-443, 444-447,488-475, or 595, or a variant thereof. In some embodiments, said endonuclease is configured to cleave one strand of a double-stranded target deoxyribonucleic acid. In some embodiments, said endonuclease is configured to be catalytically dead. In some embodiments, said endonuclease is a Class II, type II endonuclease or a Class II, type V endonuclease. In some embodiments, said endonuclease comprises a sequence having at least 70%, 80%, 90% or 95% sequence identity to any one of SEQ ID NOs:70-78 or 597, or a variant thereof. In some embodiments, said endonuclease comprises a nickase mutation. In some embodiments, said endonuclease comprises the aspartate to alanine mutation at residue 9 relative to SEQ ID NO: 70, residue 13 relative to SEQ ID NOs: 71, 72, or 74, residue 12 relative to SEQ ID NO: 73, residue 17 relative to SEQ ID NO: 75, residue 23 relative to SEQ ID NO: 76, or residue 10 relative to SEQ ID NO: 597 when optimally aligned. In some embodiments, said endonuclease is configured to bind to a protospacer adjacent motif (PAM) sequence selected from the group consisting of Sequence Numbers: A360-A368 or A598. In some embodiments, said base editor is an adenine deaminase. In some embodiments, said adenosine deaminase comprises a sequence with at least 80%, at least 81%, at least 82%, at least 83%, at least 84%, at least 85%, at least 86%, at least 87%, at least 88%, at least 89%, at least 90%, at least 91%, at least 92%, at least 93%, at least 94%, at least 95%, at least 96%, at least 97%, at least 98%, at least 99%, or 100% sequence identity to any one of SEQ ID NOs: 50-51, 385-443, or 448-475, or a variant thereof. In some embodiments, said adenosine deaminase comprises a sequence with at least 70%, 80%, 90% or 95% identity to any one of SEQ ID NOs: 50-51, 385-390, or 595, or a variant thereof. In some embodiments, said base editor is a cytosine deaminase. In some embodiments, said cytosine deaminase comprises a sequence with at least 70%, 80%, 90% or 95% identity to any one of SEQ ID NOs: 1-49, 444-447, or a variant thereof. In some embodiments, the polypeptide further comprises a uracil DNA glycosylase inhibitor coupled to said endonuclease or said base editor. In some embodiments, said uracil DNA glycosylase inhibitor comprises a sequence with at least 70%, 80%, 90% or 95% identity to any one of SEQ ID NOs: 52-56 or SEQ ID NO: 67, or a variant thereof. In some embodiments, said endonuclease comprises one or more nuclear localization sequences (NLSs) proximal to an N- or C-terminus of said endonuclease. In some embodiments, said NLS comprises a sequence with at least 90% identity to a selected from SEQ ID NOs: 369-384, or a variant thereof. In some embodiments, said endonuclease is covalently coupled directly to said base editor or covalently coupled to said base editor through a linker.

[0048] In some aspects, the present disclosure provides for a nucleic acid comprising an engineered nucleic acid sequence optimized for expression in an organism, wherein said nucleic acid encodes a sequence having at least 70%, at least 80%, at least 81%, at least 82%, at least 83%, at least 84%, at least 85%, at least 86%, at least 87%, at least 88%, at least 89%, at least 90%, at least 91%, at least 92%, at least 93%, at least 94%, at least 95%, at least 96%, at least 97%, at least 98%, at least 99%, or 100% sequence identity to any one of SEQ ID NOs: 1-51, 385-386, 387-443, 444-447, or 488-475, or a variant thereof. In some embodiments, said organism is prokaryotic, bacterial, eukaryotic, fungal, plant, mammalian, rodent, or human.

[0049] In some aspects, the present disclosure provides for a vector comprising the nucleic acid of any of the aspects or embodiments described herein. In some embodiments, the vector is a plasmid, a minicircle, a CELiD, an adeno-associated virus (AAV) derived virion, or a lentivirus.

[0050] In some aspects, the present disclosure provides for a cell comprising the vector of any one of the aspects or embodiments described herein.

[0051] In some aspects, the present disclosure provides for a method of manufacturing a base editor, comprising cultivating said cell of any one of the aspects or embodiments described herein.

[0052] In some aspects, the present disclosure provides for a system comprising: (a) the nucleic acid editing polypeptide of any of the aspects or embodiments described herein; and (b) an engineered guide ribonucleic acid structure configured to form a complex with said nucleic acid editing polypeptide comprising: a guide ribonucleic acid sequence configured to hybridize to a target deoxyribonucleic acid sequence; and a ribonucleic acid sequence configured to bind to said endonuclease. In some embodiments, said engineered guide ribonucleic acid sequence comprises a sequence with at least 80% sequence identity to non-degenerate nucleotides of any one of SEQ ID NOs: 88-96, 488-489, or 679-680.

[0053] In some aspects, the present disclosure provides for a method of modifying a target nucleic acid locus, said method comprising delivering to said target nucleic acid locus said engineered nucleic acid editing polypeptide of any of the aspects or embodiments described herein or said system of any of the aspects or embodiments described herein, wherein said complex is configured such that upon binding of said complex to said target nucleic acid locus, said complex modifies a nucleotide of said target nucleic locus.

[0054] In some aspects, the present disclosure provides for an engineered nucleic acid editing system, comprising: (a) an endonuclease comprising a RuvC domain and an HNH domain, wherein the endonuclease is derived from an uncultivated microorganism, wherein the endonuclease is a class 2, type II endonuclease, and wherein the RuvC domain lacks nuclease activity; (b) a base editor coupled to the endonuclease; and (c) an engineered guide ribonucleic acid structure configured to form a complex with the endonuclease comprising: (i) a guide ribonucleic acid sequence configured to hybridize to a target deoxyribonucleic acid sequence; and (ii) a tracr ribonucleic acid sequence configured to bind to the endonuclease. In some embodiments, the endonuclease comprises a sequence with at least 95% sequence identity to any one of SEQ ID NOs: 70-78.

[0055] In some aspects, the present disclosure provides for an engineered nucleic acid editing system comprising: (a) an endonuclease having at least 95% sequence identity to any one of SEQ ID NOs: 70-78, wherein the endonuclease comprises a RuvC domain lacking nuclease activity; a base editor coupled to the endonuclease; and an engineered guide ribonucleic acid structure configured to form a complex with the endonuclease comprising: (i) a guide ribonucleic acid sequence configured to hybridize to a target deoxyribonucleic acid sequence; and (ii) a tracr ribonucleic acid sequence configured to bind to the endonuclease.

[0056] In some aspects, the present disclosure provides for an engineered nucleic acid editing system comprising: (a) an endonuclease configured to bind to a protospacer adjacent motif (PAM) sequence comprising Sequence Numbers: A360-A368, wherein the endonuclease is a class 2, type II endonuclease, and wherein the endonuclease comprises a RuvC domain lacking nuclease activity; and (b) a base editor coupled to the endonuclease; and (c) an engineered guide ribonucleic acid structure configured to form a complex with the endonuclease comprising: (i) a guide ribonucleic acid sequence configured to hybridize to a target deoxyribonucleic acid sequence; and (ii) a tracr ribonucleic acid sequence configured to bind to the endonuclease.

[0057] In some embodiments, the endonuclease is derived from an uncultivated microorganism. In some embodiments, the endonuclease has less than 80% identity to a Cas9 endonuclease. In some embodiments, the endonuclease further comprises an HNH domain. In some embodiments, the tracr ribonucleic acid sequence comprises a sequence with at least 80% sequence identity to about 60 to 90 consecutive nucleotides selected from any one of SEQ ID NOs: 88-96, 488, 489, and 679-680.

[0058] In some aspects, the present disclosure provides an engineered nucleic acid editing system comprising, (a) an engineered guide ribonucleic acid structure comprising: (i) a guide ribonucleic acid sequence configured to hybridize to a target deoxyribonucleic acid sequence; and (ii) a tracr ribonucleic acid sequence configured to bind to an endonuclease, wherein the tracr ribonucleic acid sequence comprises a sequence with at least 80% sequence identity to about 60 to 90 consecutive nucleotides selected from any one of SEQ ID NOs: 88-96, 488, 489, and 679-680; and a class 2, type II endonuclease configured to bind to the engineered guide ribonucleic acid.

[0059] In some embodiments, the endonuclease is configured to bind to a protospacer adjacent motif (PAM) sequence selected from the group consisting of Sequence Numbers: A360-A368. In some embodiments, the base editor comprises a sequence with at least 70%, 80%, 90% or 95% identity to any one of SEQ ID NOs: 1-51 and 385-475. In some embodiments, the base editor is an adenine deaminase. In some embodiments, the adenosine deaminase comprises a sequence with at least 95% identity to SEQ ID NO: 57. In some embodiments, the base editor is a cytosine deaminase. In some embodiments, the cytosine deaminase comprises a sequence with at least 95% identity to SEQ ID NO: 58. In some embodiments, the cytosine deaminase comprises a sequence with at least 95% identity to any one of SEQ ID NOs: 59-66.

[0060] In some embodiments, the engineered nucleic acid editing system further comprises a uracil DNA glycosylase inhibitor. In some embodiments, the uracil DNA glycosylase inhibitor comprises a sequence with at least 70%, 80%, 90% or 95% identity to any one of SEQ ID NOs: 52-56 or SEQ ID NO: 67.

[0061] In some embodiments, the engineered guide ribonucleic acid structure comprises at least two ribonucleic acid polynucleotides. In some embodiments, the engineered guide ribonucleic acid structure comprises one ribonucleic acid polynucleotide comprising the guide ribonucleic acid sequence and the tracr ribonucleic acid sequence. In some embodiments, the guide ribonucleic acid sequence is complementary to a prokaryotic, bacterial, archaeal, eukaryotic, fungal, plant, mammalian, or human genomic sequence. In some embodiments, the guide ribonucleic acid sequence is 15-24 nucleotides in length. In some embodiments, the endonuclease comprises one or more nuclear localization sequences (NLSs) proximal to an N- or C-terminus of said endonuclease. In some embodiments, the endonuclease is covalently coupled directly to the base editor or covalently coupled to the base editor through a linker. In some embodiments, a polypeptide comprises the endonuclease and the base editor. In some embodiments, the endonuclease is configured to cleave one strand of a double-stranded target deoxyribonucleic acid. In some embodiments, the endonuclease comprises SEQ ID NO: 370. In some embodiments, the system further comprises a source of Mg²⁺.

[0062] In some embodiments, the endonuclease comprises a sequence at least 70%, at least 80%, or at least 90% identical to SEQ ID NO: 70; the guide RNA structure comprises a sequence at least 70%, at least 80%, or at least 90% identical to SEQ ID NO: 88; and the endonuclease is configured to bind to a PAM comprising Sequence Number: A360.

[0063] In some embodiments, the endonuclease comprises a sequence at least 70%, at least 80%, or at least 90% identical to SEQ ID NO: 71; the guide RNA structure comprises a sequence at least 70%, at least 80%, or at least 90% identical to SEQ ID NO: 89; and the endonuclease is configured to bind to a PAM comprising Sequence Number: A361.

[0064] In some embodiments, the endonuclease comprises a sequence at least 70%, at least 80%, or at least 90% identical to SEQ ID NO: 73; the guide RNA structure comprises a sequence at least 70%, at least 80%, or at least 90% identical to SEQ ID NO: 91; and the endonuclease is configured to bind to a PAM comprising Sequence Number: A363.

[0065] In some embodiments, the endonuclease comprises a sequence at least 70%, at least 80%, or at least 90% identical to SEQ ID NO: 75; the guide RNA structure comprises a sequence at least 70%, at least 80%, or at least 90% identical to SEQ ID NO: 93; and the endonuclease is configured to bind to a PAM comprising Sequence Number: A365.

[0066] In some embodiments, the endonuclease comprises a sequence at least 70%, at least 80%, or at least 90% identical to SEQ ID NO: 76; the guide RNA structure comprises a sequence at least 70%, at least 80%, or at least 90% identical to SEQ ID NO: 94; and the endonuclease is configured to bind to a PAM comprising Sequence Number: A366.

[0067] In some embodiments, the endonuclease comprises a sequence at least 70%, at least 80%, or at least 90% identical to SEQ ID NO: 77; the guide RNA structure comprises a sequence at least 70%, at least 80%, or at least 90% identical to SEQ ID NO: 95; and the endonuclease is configured to bind to a PAM comprising Sequence Number: A367.

[0068] In some embodiments, the endonuclease comprises a sequence at least 70%, at least 80%, or at least 90% identical to SEQ ID NO: 78; the guide RNA structure comprises a sequence at least 70%, at least 80%, or at least 90% identical to SEQ ID NO: 96; and the endonuclease is configured to bind to a PAM comprising Sequence Number: A368.

[0069] In some embodiments, the base editor comprises an adenine deaminase. In some embodiments, the adenine deaminase comprises SEQ ID NO: 57. In some embodiments, the base editor comprises a cytosine deaminase. In some embodiments, the cytosine deaminase comprises SEQ ID NO: 58. In some embodiments, the engineered nucleic acid editing system described herein further comprises a uracil DNA glycosylation inhibitor. In some embodiments, the uracil DNA glycosylation inhibitor comprises SEQ ID NO: 67.

[0070] In some embodiments, the sequence identity is determined by a BLASTP, CLUSTALW, MUSCLE, MAFFT, or Smith-Waterman homology search algorithm. In some embodiments, the sequence identity is determined by said BLASTP homology search algorithm using parameters of a wordlength (W) of 3, an expectation (E) of 10, and a BLOSUM62 scoring matrix setting gap costs at existence of 11, extension of 1, and using a conditional compositional score matrix adjustment.

[0071] In some aspects, the present disclosure provides a nucleic acid comprising an engineered nucleic acid sequence optimized for expression in an organism, wherein the nucleic acid encodes a class 2, type II endonuclease coupled to a base editor, and wherein the endonuclease is derived from an uncultivated microorganism.

[0072] In some aspects, the present disclosure provides a nucleic acid comprising an engineered nucleic acid sequence optimized for expression in an organism, wherein the nucleic acid encodes an endonuclease having at least 70% sequence identity to any one of SEQ ID NOs: 70-78 coupled to a base editor. In some embodiments, the endonuclease comprises a sequence encoding one or more nuclear localization sequences (NLSs) proximal to an N- or C-terminus of said endonuclease. In some embodiments, the organism is prokaryotic, bacterial, eukaryotic, fungal, plant, mammalian, rodent, or human.

[0073] In some aspects, the present disclosure provides a vector comprising a nucleic acid sequence encoding a class 2, type II endonuclease coupled to a base editor, wherein said endonuclease is derived from an uncultivated microorganism. In some embodiments, the vector comprises the nucleic acid described herein. In some embodiments, the vector further comprises a nucleic acid encoding an engineered guide ribonucleic acid structure configured to form a complex with the endonuclease comprising: a guide ribonucleic acid sequence configured to hybridize to a target deoxyribonucleic acid sequence; and a tracr ribonucleic acid sequence configured to binding to the endonuclease. In some embodiments, the vector is a plasmid, a minicircle, a CELiD, an adeno-associated virus (AAV) derived virion, or a lentivirus. In some aspects, the present disclosure provides a cell comprising the vector described herein. In some aspects, the present disclosure provides a method of manufacturing an endonuclease, comprising cultivating the cell described herein.

[0074] In some aspects, the present disclosure provides a method for modifying a double-stranded deoxyribonucleic acid polynucleotide comprising contacting the double-stranded deoxyribonucleic acid polynucleotide with a complex comprising: an endonuclease comprising a RuvC domain and an HNH domain, wherein the endonuclease is derived from an uncultivated microorganism, wherein the endonuclease is a class 2, type II endonuclease, and wherein the RuvC domain lacks nuclease activity; a base editor coupled to the endonuclease; and an engineered guide ribonucleic acid structure configured to bind to the endonuclease and the double-stranded deoxyribonucleic acid polynucleotide; wherein the double-stranded deoxyribonucleic acid polynucleotide comprises a protospacer adjacent motif (PAM).

[0075] In some embodiments, the endonuclease comprising a RuvC domain and an HNH domain is covalently coupled directly to the base editor or covalently coupled to the base editor through a linker. In some embodiments, the endonuclease comprising a RuvC domain and an HNH domain comprises a sequence with at least 95% sequence identity to any one of SEQ ID NOs: 70-78.

[0076] In some aspects, the present disclosure provides a method for modifying a double-stranded deoxyribonucleic acid polynucleotide, comprising contacting the double-stranded deoxyribonucleic acid polynucleotide with a complex comprising: a class 2, type II endonuclease, a base editor coupled to the endonuclease, and an engineered guide ribonucleic acid structure configured to bind to the endonuclease and the double-stranded deoxyribonucleic acid polynucleotide; wherein the double-stranded deoxyribonucleic acid polynucleotide comprises a protospacer adjacent motif (PAM); and wherein the PAM comprises a sequence selected from the group consisting of Sequence Numbers: A360-A368.

[0077] In some embodiments, the class 2, type II endonuclease is covalently coupled to the base editor or coupled to the base editor through a linker. In some embodiments, the base editor comprises a sequence with at least 70%, at least 80%, at least 90% or at least 95% identity to a sequence selected from SEQ ID NOs: 1-51 and 385-475. In some embodiments, the base editor comprises an adenine deaminase; the double-stranded deoxyribonucleic acid polynucleotide comprises an adenine; and modifying the double-stranded deoxyribonucleic acid polypeptide comprises converting the adenine to guanine. In some embodiments, the adenine deaminase comprises a sequence with at least 95% identity to SEQ ID NO: 57.

[0078] In some embodiments, the base editor comprises a cytosine deaminase; the double-stranded deoxyribonucleic acid polynucleotide comprises a cytosine; and modifying the double-stranded deoxyribonucleic acid polypeptide comprises converting the cytosine to uracil. In some embodiments, the cytosine deaminase comprises a sequence with at least 95% identity to SEQ ID NO: 58. In some embodiments, the cytosine deaminase comprises a sequence with at least 95% identity to any one of SEQ ID NOs: 59-66.

[0079] In some embodiments, the complex further comprises a uracil DNA glycosylase inhibitor. In some embodiments, the uracil DNA glycosylase inhibitor comprises a sequence with at least 70%, 80%, 90% or 95% identity to any one of SEQ ID NOs: 52-56 or SEQ ID NO: 67. In some embodiments, the double-stranded deoxyribonucleic acid polynucleotide comprises a first strand comprising a sequence complementary to a sequence of the engineered guide ribonucleic acid structure and a second strand comprising said PAM. In some embodiments, the PAM is directly adjacent to the 3′ end of the sequence complementary to the sequence of the engineered guide ribonucleic acid structure.

[0080] In some embodiments, the class 2, type II endonuclease is not a Cas9 endonuclease, a Cas14 endonuclease, a Cas12a endonuclease, a Cas12b endonuclease, a Cas 12c endonuclease, a Cas12d endonuclease, a Cas12e endonuclease, a Cas13a endonuclease, a Cas13b endonuclease, a Cas13c endonuclease, or a Cas 13d endonuclease. In some embodiments, the class 2, type II endonuclease is derived from an uncultivated microorganism. In some embodiments, the double-stranded deoxyribonucleic acid polynucleotide is a eukaryotic, plant, fungal, mammalian, rodent, or human double-stranded deoxyribonucleic acid polynucleotide.

[0081] In some aspects, the present disclosure provides a method of modifying a target nucleic acid locus, said method comprising delivering to said target nucleic acid locus the engineered nucleic acid editing system described herein, wherein the endonuclease is configured to form a complex with the engineered guide ribonucleic acid structure, and wherein the complex is configured such that upon binding of the complex to the target nucleic acid locus, the complex modifies a nucleotide of the target nucleic locus.

[0082] In some embodiments, the engineered nucleic acid editing system comprises an adenine deaminase, the nucleotide is an adenine, and modifying the target nucleic acid locus comprises converting the adenine to a guanine. In some embodiments, the engineered nucleic acid editing system comprises a cytidine deaminase and a uracil DNA glycosylase inhibitor, the nucleotide is a cytosine and modifying the target nucleic acid locus comprises converting the adenine to a uracil. In some embodiments, the target nucleic acid locus comprises genomic DNA, viral DNA, or bacterial DNA. In some embodiments, the target nucleic acid locus is in vitro. In some embodiments, the target nucleic acid locus is within a cell. In some embodiments, the cell is a prokaryotic cell, a bacterial cell, a eukaryotic cell, a fungal cell, a plant cell, an animal cell, a mammalian cell, a rodent cell, a primate cell, or a human cell. In some embodiments, the cell is within an animal.

[0083] In some embodiments, the cell is within a cochlea. In some embodiments, the cell is within an embryo. In some embodiments, the embryo is a two-cell embryo. In some embodiments, the embryo is a mouse embryo. In some embodiments, delivering the engineered nucleic acid editing system to the target nucleic acid locus comprises delivering the nucleic acid described herein or the vector described herein. In some embodiments, delivering the engineered nucleic acid editing system to the target nucleic acid locus comprises delivering a nucleic acid comprising an open reading frame encoding the endonuclease.

[0084] In some embodiments, the nucleic acid comprises a promoter to which the open reading frame encoding the endonuclease is operably linked. In some embodiments, delivering the engineered nucleic acid editing system to said target nucleic acid locus comprises delivering a capped mRNA containing the open reading frame encoding the endonuclease. In some embodiments, delivering the engineered nucleic acid editing system to the target nucleic acid locus comprises delivering a translated polypeptide. In some embodiments, delivering the engineered nucleic acid editing system to the target nucleic acid locus comprises delivering a deoxyribonucleic acid (DNA) encoding the engineered guide ribonucleic acid structure operably linked to a ribonucleic acid (RNA) pol III promoter.

[0085] In some aspects, the present disclosure provides an engineered nucleic acid editing polypeptide, comprising: an endonuclease comprising a RuvC domain and an HNH domain, wherein the endonuclease is derived from an uncultivated microorganism, wherein the endonuclease is a class 2, type II endonuclease, and wherein the RuvC domain lacks nuclease activity; and a base editor coupled to the endonuclease. In some embodiments, the endonuclease comprises a sequence with at least 95% sequence identity to any one of SEQ ID NOs: 70-78.

[0086] In some aspects, the present disclosure provides an engineered nucleic acid editing polypeptide, comprising: an endonuclease having at least 95% sequence identity to any one of SEQ ID NOs: 70-78, wherein the endonuclease comprises a RuvC domain lacking nuclease activity; and a base editor coupled to the endonuclease.

[0087] In some aspects, the present disclosure provides an engineered nucleic acid editing polypeptide, comprising: an endonuclease configured to bind to a protospacer adjacent motif (PAM) sequence comprising Sequence Numbers: A360-A368, wherein the endonuclease is a class 2, type II endonuclease, and wherein the endonuclease comprises a RuvC domain lacks nuclease activity; and a base editor coupled to the endonuclease.

[0088] In some embodiments, the endonuclease is derived from an uncultivated microorganism. In some embodiments, the endonuclease has less than 80% identity to a Cas9 endonuclease. In some embodiments, the endonuclease further comprises an HNH domain. In some embodiments, the tracr ribonucleic acid sequence comprises a sequence with at least 80% sequence identity to about 60 to 90 consecutive nucleotides selected from any one of SEQ ID NOs: 88-96, 488, 489, and 679-680. In some embodiments, the base editor comprises a sequence with at least 70%, 80%, 90% or 95% identity to any one of SEQ ID NOs: 1-51 and 385-475. In some embodiments, the base editor is an adenine deaminase. In some embodiments, the adenosine deaminase comprises a sequence with at least 95% identity to SEQ ID NO: 57. In some embodiments, the base editor is a cytosine deaminase. In some embodiments, the cytosine deaminase comprises a sequence with at least 95% identity to SEQ ID NO: 58. In some embodiments, the adenosine cytosine deaminase comprises a sequence with at least 95% identity to any one of SEQ ID NOs: 59-66.

[0089] Additional aspects and advantages of the present disclosure will become readily apparent to those skilled in this art from the following detailed description, wherein only illustrative embodiments of the present disclosure are shown and described. As will be realized, the present disclosure is capable of other and different embodiments, and its several details are capable of modifications in various obvious respects, all without departing from the disclosure. Accordingly, the drawings and description are to be regarded as illustrative in nature, and not as restrictive.

### INCORPORATION BY REFERENCE

[0090] All publications, patents, and patent applications mentioned in this specification are herein incorporated by reference to the same extent as if each individual publication, patent, or patent application was specifically and individually indicated to be incorporated by reference.

### BRIEF DESCRIPTION OF THE DRAWINGS

[0091] The novel features of the invention are set forth with particularity in the appended claims. A better understanding of the features and advantages of the present invention will be obtained by reference to the following detailed description that sets forth illustrative embodiments, in which the principles of the invention are utilized, and the accompanying drawings (also “Figure” and “FIG.” herein), of which:

[0092] FIG. 1 depicts example organizations of CRISPR loci of different classes and types.

[0093] FIG. 2 shows the structure of a base editor plasmid containing a T7 promoter driving expression of the systems described herein.

[0094] FIG. 3 shows plasmid maps for systems described herein. MGA contains TadA*(from ABE8.17m)-SV40 NLS and MGC contains APOBEC1 (from BE3) linked to a uracil glycosylase inhibitor and an SV40 NLS.

[0095] FIG. 4 shows predicted catalytic residues in the RuvCI domains of selected endonucleases described herein which are mutated to disrupt nuclease activity to generate nickase enzymes.

[0096] FIG. 5 depicts an example method for cloning a single guide RNA expression cassette into the systems described herein. One fragment comprises a T7 promoter plus spacer. The other fragment comprises spacer plus single guide scaffold sequence plus bidirectional terminator. The fragments are assembled into expression plasmids, resulting in functional constructs that can simultaneously express sgRNAs and base editors.

[0097] FIGS. 6A and 6B show sgRNA designs for lacZ targeting in E. coli. The spacer length used for the systems described herein was 22 nucleotides. For selected systems described herein, three sgRNAs targeting lacZ in E. coli were designed to determine editing windows.

[0098] FIG. 7 shows the nickase activity of selected mutated effectors. 600 bp double-stranded DNA fragments labeled with a fluorophore (6-FAM) on both 5′ ends were incubated with purified enzymes supplemented with their cognate sgRNAs. The reaction products were resolved on a 10% TBE-Urea denaturing gel. Double-stranded cleavage yields bands of 400 and 200 bases. Nickase activity yields bands of 600 and 200 bases.

[0099] FIGS. 8A, 8B, and 8C shows Sanger sequencing results demonstrating base edits by selected systems described herein.

[0100] FIG. 9 shows how the systems described herein expand base-editing capabilities with the endonucleases and base editors described herein.

[0101] FIGS. 10A and 10B show base editing efficiencies of adenine base editors (ABEs) comprising TadA (ABE8.17m) and MG nickases. TadA is a tRNA adenine deaminase, and TadA (ABE8.17m) is an engineered variant of E. coli TadA. 12_MG nickases fused with TadA (ABE8.17m) were constructed and tested in E. coli. Three guides were designed to target lacZ. Numbers shown in boxes indicate percentages of A to G conversion quantified by Edit R. ABE8.17m was used as the positive control for the experiment.

[0102] FIGS. 11A and 11B show base editing efficiencies of cytosine base editors (CBEs) comprising rat APOBEC1, MG nickases, and the uracil glycosylase inhibitor of Bacillus subtilis bacteriophage (UGI (PBS1)). APOBEC1 is a cytosine deaminase. 12_MG nickases fused to rAPOBEC1 on their N-terminus and UGI on their C-terminus were constructed and tested in E. coli. Three guides were designed to target lacZ. The numbers shown in boxes indicate percentages of C to T conversion quantified by Edit R. BE3 was used as the positive control in the experiment.

[0103] FIGS. 12A and 12B show effects of MG uracil glycosylase inhibitors (UGIs) on the base-editing activities of CBEs. FIG. 12A depicts a graph showing base-editing activity of MGC15-1 and variants, which comprise an N-terminal APOBEC1, the MG15-1 nickase, and a C-terminal UGI. Three MG UGIs were tested for improvements of cytosine base editing activities in E. coli. Panel FIG. 12B is a graph showing base editing activity of BE3, which comprises an N-terminal rAPOBEC1, the SpCas9 nickase, and a C-terminal UGI. Two MG UGIs were tested for improvements of cytosine base editing activities in HEK293T cells. Editing efficiencies were quantified by Edit R.

[0104] FIGS. 13A and 13B depicts maps of edited sites showing editing efficiencies of cytosine base editors comprising AOA2K5RDN7, an MG nickases, and an MG UGI. The constructs comprise an N-terminal AOA2K5RDN7, an MG nickases, and a C-terminal MG69-1. For simplicity, the identities of MG nickases are shown in the figure. BE3 was used as the positive control for base editing. An empty vector was used for the negative control. Three independent experiments were performed on different days. Abbreviations: R, repeat; NEG, negative control.

[0105] FIGS. 14A and 14B shows a positive selection method for TadA characterization in E. coli. FIG. 14A shows a map of one plasmid system used for TadA selection. The vector comprises CAT (H193Y), a sgRNA expression cassette targeting CAT, and an ABE expression cassette. In this figure, N-terminal TadA from E. coli and a C-terminal SpCas9 (D10A) from Streptococcus pyogenes are shown. FIG. 14B shows sequencing traces demonstrating that when introduced/transformed into E. coli cells, the A2 position of CAT (H193Y)'s template strand is edited, reverting the H193Y mutant to wild type and restoring its activity. Abbreviations: CAT, chloramphenicol acetyltransferase.

[0106] FIGS. 15A and 15B shows mutations caused by TadA enable high tolerance of chloramphenicol (Cm). FIG. 15A shows photographs of growth plates where different concentrations of chloramphenicol were used to select for antibiotics resistance of E. coli. In this example, wild type and two variants of TadA from E. coli (EcTadA) were tested. FIG. 15B shows a results summary table demonstrating that ABEs carrying mutated TadA show higher editing efficiencies than the wild type. In these experiments, colonies were picked from the plates with greater than or equal to 0.5 μg/mL Cm. For simplicity, identities of deaminases are shown in the table.

[0107] FIG. 16A shows photographs of growth plates to investigate MG TadA activity in positive selection. 8_MG68 TadA candidates were tested against 0 to 2 μg/mL of chloramphenicol (ABEs comprised N-terminal TadA variants and C-terminal SpCas9 (D10A) nickase). For simplicity, identities of deaminases are shown. In this experiment, colonies were picked from the plates with greater than or equal to 0.5 μg/mL Cm.

[0108] FIG. 16B summarizes the editing efficiencies of MG TadA candidates and demonstrates that MG68-3, and MG68-4 drove base edits of adenine.

[0109] FIGS. 17A and 17B showsan improvement of base editing efficiency of MG68-4_nSpCas9 via D109N mutation on MG68-4. FIG. 17A shows photographs of growth plates where wild type MG68-4 and its variant were tested against 0 to 4 μg/mL of chloramphenicol. For simplicity, identities of deaminases are shown. Adenine base editors in this experiment are comprise N-terminal TadA variants and C-terminal SpCas9 (D10A) nickase. Panel (b) shows a summary table depicting editing efficiencies of MG TadA candidates. FIG. 17B demonstrates thatMG68-4 and MG68-4 (D109N) showed base edits of adenine, with the D109N mutant showing increased activity. In this experiment, colonies were picked from the plates with greater than or equal to 0.5 μg/mL Cm.

[0110] FIGS. 18A and 18B show base editing of MG68-4 (D109N)_nMG34-1. FIG. 18A shows photographs of growth plates of an experiment where an ABE comprising N-terminal MG68-4 (D109N) and C-terminal SpCas9 (D10A) nickase was tested against 0 to 2 μg/mL of chloramphenicol. FIG. 18B shows a summary table depicting editing efficiencies with and without sgRNA. In this experiment, colonies were picked from the plates with greater than or equal to 1 μg/mL Cm.

[0111] FIG. 19 shows 28_MG68-4 variants designed for improvements of MG68-4-nMG34-1 base editing activity (SEQ ID NOs: 448-475). 12 residues were selected for targeted mutagenesis to improve editing of the enzymes.

[0112] FIG. 20 shows the results of a gel-based deaminase assay showing activity of deaminases from several selected Families (MG93, MG138, and MG139). Enzymes were expressed in a bacterial (E. coli codon optimized) Purexpress cell lysate-derived in vitro transcription-translation system and incubated with 5′FAM-labeled ssDNA and USER enzyme (uracil DNA glycosylase and endonuclease VIII) at 37° C. for 2.5 h. The resulting DNA was resolved on a denaturing polyacrylamide gel and imaged. The positive control is a sequence with a U synthetically incorporated at the same position as the target C and the negative control is a sequence with no U or C.

[0113] FIG. 21 shows a diagram illustrating base editing efficiencies of adenine base editors at specific nucleotide sites using MG68-4v1 fusing with either nMG34-1 or nSpCas9. 9 guides were designed to target genomic loci of HEK293T cells. Abbreviations: MG68-4v1, MG68-4 (D109N); nMG34-1, MG34-1 nickase; nSpCas9, SpCas9 nickase.

[0114] FIGS. 22A, 22B, 22C, 22D, 22E, and 22F show in vivo base editing with engineered MG34-1 and MG35-1 nickases. Panels (A) and (B) show base editing in the E. coli genome at four target loci. FIG. 22A shows ABE-MG34-1 base editor vs. a reference ABE-SpCas9 (both with TadA*(8.8m) deaminase). FIG. 22B shows CBE-MG34-1 base editor vs. a reference CBE-SpCas9 (both with rAPOBEC1 deaminase and PBS1 UGI). FIG. 22C shows base editing in human HEK293T cells with an ABE-MG34-1 nickase at three target loci. The target sequence for each locus in panels A, B, and C is shown above each heatmap. Expected edit positions are represented on the sequence by a subscript number and at each position on the heatmap (squares). Heatmaps in FIGS. 22 A, B, and C represent the percentage of NGS reads supporting an edit. Values in FIGS. 22 (A) and (B) represent the mean of two independent experiments, while values in panel (C) represent the mean of three independent biological replicates. FIG. 22D shows an E. coli survival assay. E. coli is transformed with a plasmid containing the ABE, a non-functional chloramphenicol acetyltransferase (CAT H193Y) gene, and an sgRNA that either targets the CAT gene (target spacer) or not (non-target spacer). E. coli survival under chloramphenicol selection is dependent on the ABE base editing the non-functional CAT gene to its wild type sequence. FIG. 22E, top panel shows a diagram of an ABE construct with an engineered MG35-1 nickase containing a C-terminal TadA*-(7.10) monomer and a SV40 NLS fused to the C-terminus. FIG. 22E, bottom panel: transformed E. coli was grown on plates containing chloramphenicol concentrations of 0, 2, 3, 4, and 8 μg/mL. Plates also contain 100 μg/mL Carbecillin and 0.1 mM IPTG. Colonies grown on plates containing chloramphenicol concentrations of 0, 2, 3, and 4 μg/mL were sequenced to assess reversion of the CAT gene. Experiments were performed in duplicate.

[0115] FIGS. 23A and 23B depict a gel-based deaminase assay showing activity of deaminases from one selected Family (MG139). Enzymes were expressed in a bacterial (E. coli codon optimized) Purexpress cell lysate-derived in vitro transcription-translation system and incubated with 5′FAM-labeled ssDNA and USER enzyme (uracil DNA glycosylase and endonuclease VIII) at 37° C. for 2.5 h. The resulting DNA was resolved on a denaturing polyacrylamide gel and imaged, which is shown in FIG. 23A. The positive control is a sequence with a U synthetically incorporated at the same position as the target C and the negative control is a sequence with no U or C. FIG. 23B depicts Percentage of deamination activity of all the active cytidine deaminases on ssDNA. The taxonomic classification of the cytidine deaminases are shown.

[0116] FIG. 24 depicts a gel-based deaminase assay showing ssDNA and dsDNA activities of deaminases from several selected Families (MG93, MG138 and MG139). Enzymes were expressed in a bacterial (E. coli codon optimized) Purexpress cell lysate-derived in vitro transcription-translation system and incubated with 5′FAM-labeled ssDNA or dsDNA and USER enzyme (uracil DNA glycosylase and endonuclease VIII) at 37° C. for 2.5 h. The resulting DNA was resolved on a denaturing polyacrylamide gel and imaged. The positive control for ssDNA activity is a sequence with a U synthetically incorporated at the same position as the target C and the negative control is a sequence with no U or C. The positive control for dsDNA activity is DddA toxin deaminase that has been documented as selective for a dsDNA substrate (Mok, B. Y., de Moraes, M. H., Zeng, J. et al. A bacterial cytidine deaminase toxin enables CRISPR-free mitochondrial base editing. Nature 583, 631-637 (2020). https://doi.org/10.1038/s41586-020-2477-4)

[0117] FIGS. 25A, 25B, and 25C depict data demonstrating that Cytosine Base Editors (CBEs) containing novel cytidine deaminases with spCas9, MG3-6, or MG34-1 effectors show varying editing levels in HEK293 cells. Each novel cytidine deaminase is fused via a linker to the N-terminus of the effector (spCas9, MG3-6, or MG34-1). A uracil glycosylase inhibitor domain (UGI or MG69-1) is fused to the C-terminus of the effector, followed by a Nuclear Localization Signal (NLS). Each CBE was transiently transfected into HEK293 cells and targeted to 5 distinct genomic locations with corresponding sgRNAs (spacer sequence indicated, targeted cytosines underlined). Editing levels (C to T (%)) of spacer sequence and surrounding cytosines are indicated for CBEs with each distinct cytidine deaminase effector (n=3).

[0118] FIGS. 26A, 26B, and 26C depicts the activity of cytidine deaminases (CDAs) fused to MG3-6. Cytidine deaminases were fused to MG3-6 and their activity was assessed by targeting an engineered site in a reporter cell line. FIG. 26A shows relative activity of various CDAs, controls used were a highly active CBE from literature A0A2K5RDN7, as well as rAPOBEC1. FIG. 26B shows quantification of activity of various CDAs in comparison to the highly active CDA A0A2K5RDN7. FIG. 26C shows MG139-52 activity highlighting the G-A conversion suggesting editing of the opposite strand—the strand in the DNA/RNA heteroduplex in the R-loop.

[0119] FIGS. 27A and 27B depict a toxicity assay in mammalian cells. Toxicity of CDAs was measured by stable expression of CDAs as CBEs (fused to MG3-6). HEK293T cells stably expressing CBEs were grown in puromycin for 3 days, alive cells were stained with crystal violet. Crystal violet dye was then solubilized with 1% SDS and quantified in a plate reader. FIG. 27A shows a picture of cells stained with crystal violet; FIG. 27B shows quantification of FIG. 27A. Absorbance was taken in a plate reader at 570 nm.

[0120] FIG. 28 depicts mutations identified from chloramphenicol selection in E. coli. r1v1 variant was the starting variant for the evolution experiment. 24 variants were identified and the associated mutations were shown in the table.

[0121] FIG. 29 depicts beneficial mutations identified from variant screening in HEK293T. The predicted structure of MG68-4 is aligned with tRNA^{Arg2} from S. aureus TadA (PDB 2B3J). Key mutated residues are highlighted in the structural display.

[0122] FIG. 30 depicts screening of MG68-4 variants in HEK293T cells. Four guides were used to screen the activity, editing window, and sequence preference of engineered variants.

[0123] FIG. 31 depicts the ABE-MG35-1 E. coli survival assay sequencing results. Surviving colonies were picked from plates under chloramphenicol selection for the first experimental replicate and Sanger-sequenced. Sequencing of four of five selected colonies show a mutation from A back to G on the negative strand, restoring CAT function from Y193 back to H on the positive strand (boxed nucleotides). A bystander base edit was observed in two of the five sequenced colonies.

[0124] FIG. 32 depicts increased cytosine base editing efficiency upon Fam72a expression.

[0125] FIG. 33 depicts data demonstrating that structurally optimized adenine base editors (ABEs) show varying editing levels in HEK293 cells. Each of 33 ABEs was constructed by inserting the MG68-4 (D109N) deaminase upstream, downstream, or within the MG3-6_3-8 (D13A) nickase enzyme and cloned into the pCMV vector. These plasmids were co-transfected with a plasmid containing one of 8 sgRNAs targeting the HEK293 genome. Data shown is from a sgRNA targeting the ACAGACAAAACTGTGCTAGACA sequence. Editing levels (A to G (%)) of A5, A7, A8, A9, and A10 within the spacer sequence are indicated as well as cell viability of each individual experiment (n=2).

[0126] FIG. 34A-FIG. 34B depicts rational design of MG68-4 variants. FIG. 34A depicts structural alignment of E. coli TadA (PDB:1z3a) and the predicted structure of MG68-4. tRNA structure was retrieved from S. aureus TadA (PDB: 2b3j). FIG. 34B depicts mutations identified from EcTadA for developments of adenine base editors (ABE7.10, ABE8.8m, ABE8.17m, and ABE8e) and equivalent residues of EcTadA on MG68-4. The mutations of EcTadA were installed to MG68-4 accordingly. H129N was identified from a bacterial selection in E. coli. In general, nuclear localization signal (SV40) was positioned on the C-terminus. For 2NLS constructs, one SV40 was used on the N-terminus and one SV40 was used on the C-terminus. For simplicity, deaminase sequences of adenine base editors are shown in the table. Abbreviations: MGA0.1, MG68-4; MGA1.1, MG68-4 (D109N); MGA2.1, MG68-4 (D109N/H129N); RD, rationally designed variants.

[0127] FIG. 35 depicts screening of adenine base editors in HEK293T cells. The top three variants are highlighted. The starting variant is MGA1.1. For 2NLS constructs, one SV40 was used on the N-terminus and one SV40 was used on the C-terminus. Abbreviations: MGA0.1, MG68-4; MGA1.1, MG68-4 (D109N); MGA2.1, MG68-4 (D109N/H129N); RD, rationally designed variants.

[0128] FIG. 36 depicts a table summarizing the base editing activity of rationally designed ABE variants described herein.

[0129] FIG. 37 depicts a gel-based deaminase assay showing activity of variant deaminases from several selected Families (MG93, MG139, and MG152). Enzymes were expressed in a bacterial (E. coli codon optimized) Purexpress cell lysate-derived in vitro transcription-translation system and incubated with 5′FAM-labeled ssDNA and USER enzyme (uracil DNA glycosylase and endonuclease VIII) at 37° C. for 2.5 h. The resulting DNA was resolved on a denaturing polyacrylamide gel and imaged. The positive control is a sequence with a U synthetically incorporated at the same position as the target C and the negative control is a sequence with no U or C.

[0130] FIG. 38A-FIG. 38C depicts a gel-based deaminase with dual fluorophore assay. FIG. 38A depicts a schematic of substrate design. Substrates were designed for minimal overlap between the two fluorophores. Emission for Cy3 is around 560 nm and the emission peak for Cy5.5 is around 700 nm. FIGS. 38B and 38C depict TBE-Urea Gel Images imaged using a Cy3 and Cy5.5 filter, respectively. RF157 is a single nucleotide substrate with a FAM molecule to act as a positive control to confirm the USER enzyme is cutting in the reaction and provide confirmation that the filter works and can discriminate between either fluorophore. A mastermix is used as a negative control to provide a baseline measurement for the uncut substrate. FIG. 38B: Deaminases that preferentially cut the substrate at T at the −1 position give a fluorescent product of 65 nts. Substrates cut at C at the −1 position give a product of 45 nts. Deaminases active on both C or T at the −1 position will give a product of 30 nts. FIG. 38C: Deaminase that preferentially cut substrate at G at the −1 position give a fluorescent product of 65 nts. Substrates cut at C at the −1 position give a product of 45 nts. Deaminases active on both A or G at the −1 position will give a product of 30 nts.

[0131] FIG. 39 depicts the percentage of deamination for each −1 position to the target Cytidine for each variant (MG93 and MG152 families) tested in this study.

[0132] FIG. 40 depicts the percentage of deamination for each −1 position to the target Cytidine for each variant (MG139 family) tested in this study.

[0133] FIG. 41A-FIG. 41C depicts a summary of activity data for novel and engineered CDAs as CBEs in mammalian cells. FIG. 41A depicts the maximum detected editing efficiency for all tested CDAs across 5 engineered spacers. FIG. 41B depicts the maximum detected activity normalized to internal positive control across 5 engineered spacers. The internal experimental positive control used for normalization was a highly active CDA “A0A2K5RDN7”. FIG. 41C depicts side by side comparison of one of the lead candidates “139-52-V6” versus the highly active positive control “A0A2K5RDN7” with 2 guides. 139-52-V6 shows similar editing efficiencies in comparison to the highly active tested CDA.

[0134] FIG. 42 depicts the −1 nt preference of CDAs with more than 1% editing activity as CBEs in mammalian cells. The comparison of the −1 nt preference in mammalian cells vs in vitro is shown. −1 preference observed in mammalian cells as CBEs is by the most part comparable to the in vitro preference. The in vitro preference shows a more relaxed pattern than the CBE activity in mammalian cells.

[0135] FIG. 43A-FIG. 43C depicts an example of MG139-52 wt and mutated at N27 to A, MG139-52v6 that show differences of activity on ssDNA and/or on RNA:DNA duplex. FIG. 43A depicts a structural prediction of MG139-52 using A3H as template (pdb: 5W3V). The targeted mutation at N27 is indicated by an arrow and is located far away for the catalytic center and the recognition loop 7. FIG. 43B depicts a cartoon showing the DNA/RNA heteroduplex in the R-loop that is targeted by 139-52 WT. CRISPResso output shows the G-A conversion indicative of deamination in the DNA strand forming a DNA/RNA heteroduplex. FIG. 43C depicts CRISPREsso output showing that the G-A change in the DNA/RNA heteroduplex was abrogated with the N27A variant. Instead, such modification happens outside the DNA/RNA heteroduplex, suggesting that deamination in the DNA/RNA heteroduplex has been impaired.

[0136] FIG. 44 depicts the editing window of lead CDAs in comparison to the highly active CDA A0A2K5RDN7. The editing window shown corresponds to ˜110 nts. The R loop (Cas9 target) is shown as a square. Lead candidates 152-6 and 139-52-V6 have smaller editing windows than A0A2K5RDN7, a favorable feature to avoid off target edits. Engineered CDA 139-52-V6 shows a smaller editing window than its WT counterpart 139-52.

[0137] FIG. 45 depicts the mammalian cytotoxicity of stably expressed CDAs as CBEs. CDAs, expressed as CBEs, were stably expressed in mammalian cells by lentiviral integration. The cytotoxicity was measured as fold change relative to a low activity low cytotoxic CDA (rAPOBEC). The lead candidates (high editing efficiency) show medium cytotoxic activity under these conditions. It is understood that the cytotoxic activity will be reduced when the system is expressed transiently.

[0138] FIG. 46A-FIG. 46B depicts the dimeric design of MG68-4 variants. FIG. 46A depicts the predicted structure of MG68-4 and structural alignment of MG68-4 with SaTadA (PDB code: 2b3j). The distance between N-terminus of the first monomer and C-terminus of the second monomer is shown. FIG. 46B depicts base editing efficiency comparing the monomeric and dimeric designs. TadA*8.8m was used for benchmarking. The target sequence is shown in the bar chart. Conversion of A to G was obtained from the highest editing position A8. All deaminases were fused to the N-terminus of MG34-1 (D10A). The editing was evaluated in HEK293T cells.

[0139] FIG. 47 depicts the effect of D109Q mutation to base substitution of C to G. A to G and C to G conversions were obtained from the target sequences 633 and 634, respectively. The editing efficiencies of residue C6 of target sequence 633 and residue A8 of target sequence 634 are shown. All deaminases were fused to the N-terminus of MG34-1 (D10A). The editing efficiency was evaluated in HEK293T cells.

[0140] FIG. 48 depicts base editing efficiency of the combinatorial library in HEK293T cells. Beneficial mutations identified from rational design and directed evolution were installed into MG68-4 to make the combinatorial library. The variants were inserted into 3-68_DIV30_M_RDr1v1_B. The editing efficiency was evaluated in HEK293T cells.

[0141] FIG. 49 depicts the effects of MG68-4 dimerization and/or MG68-4 amino acid sequence variants within the 3-68_DIV30 scaffold on A to G conversion percentage in HEK293T cells.

[0142] FIG. 50A-FIG. 50B depicts data demonstrating that the MG35-1 nickase can function as the scaffold of an adenine base editor in E. Coli cells. FIG. 50A depicts a schematic of the MG35-1 adenine base editor (ABE) containing a C-terminal TadA*-(7.10) monomer and an SV40 NLS fused to the C-terminus. FIG. 50B depicts a chloramphenicol selection experiment used to assess MG35-1 ABE base editing. A plasmid containing the MG35-1 ABE, a non-functional chloramphenicol acetyltransferase (CAT) gene, and a sgRNA that either targets the CAT gene (targeting sgRNA) or does not target the CAT gene (non-targeting sgRNA) are transformed into BL21(DE3) (Lucigen) E. Coli cells. E. Coli survival under chloramphenicol selection was dependent on the MG35-1 ABE editing the non-functional CAT gene to its wildtype sequence. Transformed E. Coli was plated on plates containing chloramphenicol concentrations of 0, 2, 3, 4, and 8 μg/mL. Plates also contained 100 μg/mL Carbecillin and 0.1 mM IPTG. Colonies grown on plates containing chloramphenicol concentrations of 0, 2, 3, 4, and 8 μg/mL were sequenced to assess reversion of the CAT gene. Experiments were performed as n=2.

[0143] FIG. 51 depicts the activity of 3-6/8 ABE at Apoa1. High A to G conversion was observed with 26 Apoa1 guides. For all spacers shown in the graph, base conversion at all A positions within the spacer region is shown.

[0144] FIG. 52 depicts the activity of 3-6/8 ABE at Angptl3. High A to G conversion was observed with 5 Angptl3 guides. For all spacers shown in the graph, base conversion at all A positions within the spacer region is shown.

[0145] FIG. 53 depicts the activity of 3-6/8 ABE at Trac. High A to G conversion was observed with 2 Trac guides. For all spacers shown in the graph, base conversion at all A positions within the spacer region is shown.

[0146] FIG. 54 depicts the background 3-6/8 ABE activity at Apoa1. Primer pairs for active guides were tested on mock-nucleofected samples to assay background editing at targeted regions. Scale is from 0 to 1%.

[0147] FIG. 55A-FIG. 55E depicts an E. coli survival assay with an nMG35-1 ABE. E. coli was transformed with a plasmid containing the nMG35-1-ABE, a non-functional chloramphenicol acetyltransferase (CAT Y193) gene, and an sgRNA that either targets the CAT gene (targeting spacer) or not (scramble spacer). FIG. 55A depicts a diagram showing the target sequences with the expected TAM. Cell growth is dependent on the ABE base editing the non-functional CAT gene (A at position 17 from the TAM/PAM, boxed) to restore activity. FIGS. 55B-55E depicts the base editing activity in E. coli of base editors comprising nMG35-1 fused to the TadA deaminase with linkers of various lengths. The X axis shows the linkers listed in Table 14.

[0148] FIG. 56A-FIG. 56D depicts the evaluation of nMG35-1 ABE base editing in an E. coli survival assay under chloramphenicol selection, where cell growth is dependent on the ABE base editing the non-functional CAT gene stop codon and restoring activity. FIGS. 56A-56B depict diagrams showing the target sequences with the expected TAM. The “A” base at position 11 (A) or 10 (B) from the TAM (boxes) is expected to edit to “G” in order to revert the stop codon to glutamine and restore chloramphenicol (cm) resistance. FIG. 56C: E. coli was transformed with a plasmid containing the nMG35-1-ABE, a non-functional chloramphenicol acetyltransferase (CAT), and an sgRNA that either targets the CAT gene (targeting spacer) or not (no spacer). Transformed E. coli was grown on plates containing chloramphenicol concentrations of 0, 2, 4, and 8 μg/mL. Plates also contained 100 μg/mL Carbecillin and 0.1 mM IPTG. The nMG35-1-ABE targeting both STOP98Q and STOP122Q contains both stop codons in the same gene that need to be reverted for CAT gene functionality. MIC: minimum inhibitory concentration. FIG. 56D depicts Sanger sequencing chromatograms of five of 18 colonies grown at 2 μg/mL of chloramphenicol for the nMG35-1 ABE double reversion of STOP98Q and STOP122Q in the CAT gene. The chromatogram of the colony that does not show reversion (colony 3) reveals a smaller peak for A to G conversion that is likely obscured due to co-transformation with an unedited plasmid.

[0149] FIG. 57 depicts data demonstrating that truncation of the predicted PLMP domain at the N-terminus of MG35-1 ablates function of the MG35-1 ABE in E. coli. E. coli was transformed with a plasmid containing the nMG35-1-ABE, a non-functional chloramphenicol acetyltransferase (CAT), and an sgRNA that either targets the CAT gene (WT (top row) or PLMP domain truncation (bottom row) MG35-1 ABE) or a non-target spacer (middle row: WT MG35-1 ABE with a scrambled spacer). Transformed E. coli was grown on plates containing chloramphenicol concentrations of 0, 2 and 4 μg/mL. Plates also contained 100 μg/mL Carbecillin and 0.1 mM IPTG. MIC: minimum inhibitory concentration.

### BRIEF DESCRIPTION OF THE SEQUENCE LISTING

[0150] The Sequence Listing filed herewith provides exemplary polynucleotide and polypeptide sequences for use in methods, compositions and systems according to the disclosure. Below are exemplary descriptions of sequences therein.

[0151] SEQ ID NOs: 1-47 show the full-length peptide sequences of MG66 deaminases suitable for the engineered nucleic acid editing systems described herein.

[0152] SEQ ID NOs: 48-49 show the full-length peptide sequences of MG67 deaminases suitable for the engineered nucleic acid editing systems described herein.

[0153] SEQ ID NOs: 50-51 show the full-length peptide sequences of MG68 deaminases suitable for the engineered nucleic acid editing systems described herein.

[0154] SEQ ID NOs: 52-56 show the sequences of uracil DNA glycosylase inhibitors suitable for the engineered nucleic acid editing systems described herein.

[0155] SEQ ID NOs: 57-66 show the sequences of reference deaminases.

[0156] SEQ ID NO: 67 shows the sequence of a reference uracil DNA glycosylase inhibitor.

[0157] SEQ ID NO: 68 shows the sequence of an adenine base editor.

[0158] SEQ ID NO: 69 shows the sequence of a cytosine base editor.

[0159] SEQ ID NOs: 70-78 show the full-length peptide sequences of MG nickases suitable for the engineered nucleic acid editing systems described herein.

[0160] SEQ ID NOs: 79-87 shows the protospacer and PAM used in in vitro nickase assays described herein.

[0161] SEQ ID NOs: 88-96 show the peptide sequences of single guide RNA used in in vitro nickase assays described herein.

[0162] SEQ ID NOs: 97-156 show the sequences of spacers when targeting E. coli lacZ.

[0163] SEQ ID NOs: 157-176 show the sequences of primers when conducting site directed mutagenesis.

[0164] SEQ ID NOs: 177-178 show the sequences of primers for lacZ sequencing.

[0165] SEQ ID NOs: 179-342 show the sequences of primers used during amplification.

[0166] SEQ ID NOs: 343-345 show the sequences of primers for lacZ sequencing.

[0167] SEQ ID NOs: 346-359 show the sequences of primers used during amplification.

[0168] Sequence Numbers: A360-A368 show protospacer adjacent motifs suitable for the engineered nucleic acid editing systems described herein.

[0169] SEQ ID NOs: 369-384 show nuclear localization sequences (NLS's) suitable for the engineered nucleic acid editing systems described herein.

[0170] SEQ ID NOs: 385-443 show the full-length peptide sequences of MG68 deaminases suitable for the engineered nucleic acid editing systems described herein.

[0171] SEQ ID NOs: 444-447 show the full-length peptide sequences of MG121 deaminases suitable for the engineered nucleic acid editing systems described herein.

[0172] SEQ ID NOs: 448-475 show the full-length peptide sequences of MG68 deaminases suitable for the engineered nucleic acid editing systems described herein.

[0173] SEQ ID NOs: 476 and 477 show sequences of adenine base editors.

[0174] SEQ ID NOs: 478-482 show sequences of cytosine base editors.

[0175] SEQ ID NOs: 483-487 show the sequences of plasmids suitable for encoding the engineered nucleic acid editing systems described herein.

[0176] SEQ ID NOs: 488 and 489 show the sgRNA scaffold sequences for MG15-1 and MG34-1.

[0177] SEQ ID NOs: 490-522 show the sequences of spacers used to target genomic loci in E. coli and HEK293T cells.

[0178] SEQ ID NOs: 523-585 show the sequences of primers used during amplification and Sanger sequencing.

[0179] SEQ ID NOs: 584-585 show the sequences of primers used during amplification.

[0180] SEQ ID NO: 586 shows the sequence of an adenine base editor.

[0181] SEQ ID NO: 587 shows the sequence of a cytosine base editor.

[0182] SEQ ID NOs: 588-589 show sequences of adenine base editors.

[0183] SEQ ID NOs: 590-593 show the full-length peptide sequences of linkers suitable for the engineered nucleic acid editing systems described herein.

[0184] SEQ ID NO: 594 shows the sequence of a cytosine deaminase.

[0185] SEQ ID NO: 595 shows the sequence of an adenosine deaminase.

[0186] SEQ ID NO: 596 shows the sequence of an MG34 active effector suitable for the engineered nucleic acid editing systems described herein.

[0187] SEQ ID NO: 597 shows the sequence of an MG34 nickase suitable for the engineered nucleic acid editing systems described herein.

[0188] Sequence Number: A598 shows the sequence of an MG34 PAM.

[0189] SEQ ID NOs: 599-638 show the full-length peptide sequences of MG138 cytidine deaminases suitable for the engineered nucleic acid editing systems described herein.

[0190] SEQ ID NOs: 639-659 show the full-length peptide sequences of MG139 cytidine deaminases suitable for the engineered nucleic acid editing systems described herein.

[0191] SEQ ID NOs: 660-662 show the full-length peptide sequences of MG141 cytidine deaminases suitable for the engineered nucleic acid editing systems described herein.

[0192] SEQ ID NOs: 663-664 show the full-length peptide sequences of MG142 cytidine deaminases suitable for the engineered nucleic acid editing systems described herein.

[0193] SEQ ID NOs: 665-675 show the full-length peptide sequences of MG93 cytidine deaminases suitable for the engineered nucleic acid editing systems described herein.

[0194] SEQ ID NOs: 676-678 show sequences of adenine base editors.

[0195] SEQ ID NOs: 679-680 show the sgRNA scaffold sequences for MG34-1 and SpCas9.

[0196] SEQ ID NOs: 681-689 show spacer sequences used to target genomic loci in guide RNAs.

[0197] SEQ ID NOs: 690-707 show sequences of primers used to amplify genomic targets of adenine bae editors (ABE) for next generation sequencing (NGS) analysis.

[0198] SEQ ID NO: 708 shows the sequence of a blasticidin (BSD) resistance cassette.

[0199] SEQ ID NOs: 709-719 show spacer sequences used to target genomic loci in guide RNAs.

[0200] SEQ ID NOs: 720-726 show the sequences of plasmids suitable for encoding the engineered nucleic acid editing systems described herein.

[0201] SEQ ID NOs: 728-729 show sequences of adenine base editors.

[0202] SEQ ID NOs: 730-736 show spacer sequences used to target genomic loci in guide RNAs.

[0203] SEQ ID NOs: 737-738 show the sequences of plasmids suitable for encoding the engineered nucleic acid editing systems described herein.

[0204] SEQ ID NOs: 739-740 show sequences of cytidine base editors.

[0205] SEQ ID NO: 741 shows the sequence of a plasmid suitable for encoding the A1CF gene.

[0206] SEQ ID NO: 742 shows the sequence of an RNA used to test CDAs for RNA activity.

[0207] SEQ ID NO: 743 shows the sequence of a labelled primer for poisoned primer extension assay used to test CDAs for RNA activity.

[0208] SEQ ID NOs: 744-827 show the full-length peptide sequences of MG139 cytidine deaminases suitable for the engineered nucleic acid editing systems described herein.

[0209] SEQ ID NO: 828 shows the full-length peptide sequence of an MG93 cytidine deaminase suitable for the engineered nucleic acid editing systems described herein.

[0210] SEQ ID NO: 829 shows the full-length peptide sequence of an MG142 cytidine deaminase suitable for the engineered nucleic acid editing systems described herein.

[0211] SEQ ID NOs: 830-835 show the full-length peptide sequences of MG152 cytidine deaminases suitable for the engineered nucleic acid editing systems described herein.

[0212] SEQ ID NOs: 836-860 show sequences of adenine base editors.

[0213] SEQ ID NOs: 861-864 show spacer sequences used to target genomic loci in guide RNAs.

[0214] SEQ ID NOs: 865-872 show sequences of primers used to amplify genomic targets of adenine bae editors (ABE) for next generation sequencing (NGS) analysis.

[0215] SEQ ID NOs: 873-875 show the sequences of plasmids suitable for encoding the engineered nucleic acid editing systems described herein.

[0216] SEQ ID NO: 876 shows the sgRNA scaffold sequence for MG34-1.

[0217] SEQ ID NOs: 877-916 show sequences of cytosine base editors.

[0218] SEQ ID NOs: 917-931 show the sequences of sgRNAs suitable for the engineered nucleic acid editing systems described herein.

[0219] SEQ ID NOs: 932-961 show sequences of primers used to amplify genomic targets of adenine base editors (ABE) for next generation sequencing (NGS) analysis.

[0220] SEQ ID NO: 962 shows a site engineered in mammalian cell line with 5 PAMs compatible with Cas9 and MG3-6 editing.

[0221] SEQ ID NOs: 963-967 show the sequences of sgRNAs suitable for the engineered nucleic acid editing systems described herein.

[0222] SEQ ID NOs: 968-969 show sequences of cytosine base editors.

[0223] SEQ ID NO: 970 shows the full-length peptide sequence of an MG139 cytidine deaminase suitable for the engineered nucleic acid editing systems described herein.

[0224] SEQ ID NOs: 971-977 show the full-length peptide sequences of MG93 cytidine deaminases suitable for the engineered nucleic acid editing systems described herein.

[0225] SEQ ID NOs: 978-981 show the full-length peptide sequences of MG138 cytidine deaminases suitable for the engineered nucleic acid editing systems described herein.

[0226] SEQ ID NO: 982 shows the full-length peptide sequence of MG142 cytidine deaminase suitable for the engineered nucleic acid editing systems described herein.

[0227] SEQ ID NO: 983-1014 shows the full-length peptide sequence of MG128 deaminases suitable for the engineered nucleic acid editing systems described herein.

[0228] SEQ ID NO: 1015-1026 shows the full-length peptide sequence of MG129 deaminases suitable for the engineered nucleic acid editing systems described herein.

[0229] SEQ ID NO: 1027-1031 shows the full-length peptide sequence of MG130 deaminases suitable for the engineered nucleic acid editing systems described herein.

[0230] SEQ ID NO: 1032-1040 shows the full-length peptide sequence of MG131 deaminases suitable for the engineered nucleic acid editing systems described herein.

[0231] SEQ ID NO: 1041-1043 shows the full-length peptide sequence of MG132 deaminases suitable for the engineered nucleic acid editing systems described herein.

[0232] SEQ ID NO: 1044-1057 shows the full-length peptide sequence of MG133 deaminases suitable for the engineered nucleic acid editing systems described herein.

[0233] SEQ ID NO: 1058-1061 shows the full-length peptide sequence of MG134 deaminases suitable for the engineered nucleic acid editing systems described herein.

[0234] SEQ ID NO: 1062-1069 shows the full-length peptide sequence of MG135 deaminases suitable for the engineered nucleic acid editing systems described herein.

[0235] SEQ ID NO: 1070-1081 shows the full-length peptide sequence of MG136 deaminases suitable for the engineered nucleic acid editing systems described herein.

[0236] SEQ ID NO: 1082-1098 shows the full-length peptide sequence of MG137 deaminases suitable for the engineered nucleic acid editing systems described herein.

[0237] SEQ ID NOs: 1099-1105 show the sequences of sgRNAs suitable for the engineered nucleic acid editing systems described herein.

[0238] SEQ ID NOs: 1106-1111 show the sequences of MG35 PAMs.

[0239] SEQ ID NO: 1112 shows the DNA sequence of a gene encoding the ABE-MG35-1 adenine base editor.

[0240] SEQ ID NO: 1113 shows the protein sequence of the ABE-MG35-1 adenine base editor.

[0241] SEQ ID NO: 1114 shows the nucleotide sequence of a plasmid encoding a Cas9-based cytosine base editor (CBE).

[0242] SEQ ID NO: 1115 shows the nucleotide sequence of a plasmid encoding Fam72a.

[0243] SEQ ID NOs: 1116-1117 show the sequences of Cas9-CBE target sites.

[0244] SEQ ID NOs: 1118-1119 show the sequences of NGS amplicons.

[0245] SEQ ID NO: 1120 shows the full-length peptide sequence of an MG35 nuclease.

[0246] SEQ ID NO: 1121 shows the full-length peptide sequence of Fam72A.

[0247] SEQ ID NOs: 1121-1127 shows the full-length peptide sequences of MG35 nucleases.

[0248] SEQ ID NOs: 1128-1160 shows the full-length peptide sequences of MG3-6/3-8 adenine base editors.

[0249] SEQ ID NOs: 1161-1186 shows the full-length peptide sequences of MG34-1 adenine base editors.

[0250] SEQ ID NOs: 1187-1195 show the sequences of sgRNAs suitable for the engineered nucleic acid editing systems described herein.

[0251] SEQ ID NOs: 1196-1204 show spacer sequences used to target genomic loci in guide RNAs.

[0252] SEQ ID NO: 1205 shows the nucleotide sequence of a plasmid encoding an MG3-6/3-8 adenine base editor.

[0253] SEQ ID NO: 1206 shows the nucleotide sequence of a plasmid encoding an sgRNA suitable for an MG3-6/3-8 adenine base editor described herein.

[0254] SEQ ID NO: 1207 shows the nucleotide sequence of a plasmid encoding an MG34-1 adenine base editor.

[0255] SEQ ID NOs: 1208-1269 show the full-length peptide sequences of MG93 deaminases suitable for the engineered nucleic acid editing systems described herein.

[0256] SEQ ID NOs: 1270-1296 show the full-length peptide sequences of MG139 deaminases suitable for the engineered nucleic acid editing systems described herein.

[0257] SEQ ID NOs: 1297-1311 show the full-length peptide sequences of MG152 deaminases suitable for the engineered nucleic acid editing systems described herein.

[0258] SEQ ID NOs: 1312-1313 show the full-length peptide sequences of MG138 deaminases suitable for the engineered nucleic acid editing systems described herein.

[0259] SEQ ID NOs: 1314-1315 show the full-length peptide sequences of MG139 deaminases suitable for the engineered nucleic acid editing systems described herein.

[0260] SEQ ID NOs: 1316-1319 show the nucleotide sequences of 5′-FAM-labeled ssDNAs.

[0261] SEQ ID NOs: 1320-1321 show the nucleotide sequences of Cy5.5-labeled ssDNAs.

[0262] SEQ ID NOs: 1322-1355 show sequences of cytidine base editors.

[0263] SEQ ID NOs: 1356-1362 show the full-length peptide sequences of MG34-1 adenine base editors.

[0264] SEQ ID NOs: 1363-1415 show the full-length peptide sequences of MG3-6/3-8 adenine base editors.

[0265] SEQ ID NOs: 1416-1417 show the nucleotide sequences of sgRNAs suitable for use with MG34-1 adenine base editors described herein.

[0266] SEQ ID NO: 1418 shows the nucleotide sequence of an sgRNA suitable for use with MG3-6/3-8 adenine base editors described herein.

[0267] SEQ ID NOs: 1419-1420 show the DNA sequences of target sites suitable for targeting by MG34-1 adenine base editors described herein.

[0268] SEQ ID NO: 1421 shows a DNA sequence of a target site suitable for targeting by MG3-6/3-8 adenine base editors described herein.

[0269] SEQ ID NO: 1422 shows the nucleotide sequence of a plasmid suitable for expression of an MG34-1 adenine base editor described herein.

[0270] SEQ ID NO: 1423 shows the nucleotide sequence of a plasmid suitable for expression of an MG3-6/3-8 adenine base editor described herein.

[0271] SEQ ID NO: 1424 shows the full-length peptide sequence of an MG35-1 adenine base editor.

[0272] SEQ ID NO: 1425-1426 show the nucleotide sequences of plasmids suitable for expression of MG35-1 adenine base editors and sgRNAs described herein.

[0273] SEQ ID NOs: 1427-1428 show the nucleotide sequences of sgRNAs suitable for use with MG35-1 adenine base editors described herein.

[0274] SEQ ID NOs: 1429-1430 show the DNA sequences of target sites suitable for targeting by MG35-1 adenine base editors described herein.

[0275] SEQ ID NOs: 1431-1454 show the nucleotide sequences of sgRNAs engineered to function with an MG3-6/3-8 adenine base editor in order to target APOA1.

[0276] SEQ ID NOs: 1455-1478 show the DNA sequences of APOA1 target sites.

[0277] SEQ ID NOs: 1479-1483 show the nucleotide sequences of sgRNAs engineered to function with an MG3-6/3-8 adenine base editor in order to target ANGPTL3.

[0278] SEQ ID NOs: 1484-1488 show the DNA sequences of ANGPTL3 target sites.

[0279] SEQ ID NOs: 1489-1490 show the nucleotide sequences of sgRNAs engineered to function with an MG3-6/3-8 adenine base editor in order to target TRAC.

[0280] SEQ ID NOs: 1491-1492 show the DNA sequences of TRAC sites.

[0281] SEQ ID NOs: 1493-1516 show the nucleotide sequences of NGS primers suitable for use in assessing base editing of APOA1.

[0282] SEQ ID NOs: 1517-1521 show the nucleotide sequences of NGS primers suitable for use in assessing base editing of ANGPTL3.

[0283] SEQ ID NOs: 1522-1523 show the nucleotide sequences of NGS primers suitable for use in assessing base editing of TRAC.

[0284] SEQ ID NOs: 1524-1547 show the nucleotide sequences of NGS primers suitable for use in assessing base editing of APOA1.

[0285] SEQ ID NOs: 1548-1552 show the nucleotide sequences of NGS primers suitable for use in assessing base editing of ANGPTL3.

[0286] SEQ ID NOs: 1553-1554 show the nucleotide sequences of NGS primers suitable for use in assessing base editing of TRAC.

[0287] SEQ ID NO: 1555 shows the nucleotide sequence of a plasmid suitable for use in mRNA production.

[0288] SEQ ID NOs: 1556-1562 show the full-length peptide sequences of MG131 adenine deaminase variants.

[0289] SEQ ID NOs: 1563-1566 show the full-length peptide sequences of MG134 adenine deaminase variants.

[0290] SEQ ID NOs: 1567-1574 show the full-length peptide sequences of MG135 adenine deaminase variants.

[0291] SEQ ID NOs: 1575-1589 show the full-length peptide sequences of MG137 adenine deaminase variants.

[0292] SEQ ID NOs: 1590-1599 show the full-length peptide sequences of MG68 adenine deaminase variants.

[0293] SEQ ID NOs: 1600-1602 show the full-length peptide sequences of MG132 adenine deaminase variants.

[0294] SEQ ID NOs: 1603-1616 show the full-length peptide sequences of MG133 adenine deaminase variants.

[0295] SEQ ID NOs: 1617-1624 show the full-length peptide sequences of MG136 adenine deaminase variants.

[0296] SEQ ID NOs: 1625-1633 show the full-length peptide sequences of MG129 adenine deaminase variants.

[0297] SEQ ID NOs: 1634-1638 show the full-length peptide sequences of MG130 adenine deaminase variants.

[0298] SEQ ID NOs: 1639-1644 show the full-length peptide sequences of MG34-1 adenine base editors.

[0299] SEQ ID NOs: 1645-1646 show the nucleotide sequences of ssDNA substrates suitable for testing adenine deaminase activity in vitro.

### DETAILED DESCRIPTION

[0300] While various embodiments of the invention have been shown and described herein, it will be obvious to those skilled in the art that such embodiments are provided by way of example only. Numerous variations, changes, and substitutions may occur to those skilled in the art without departing from the invention. It should be understood that various alternatives to the embodiments of the invention described herein may be employed.

[0301] The practice of some methods disclosed herein employ, unless otherwise indicated, techniques of immunology, biochemistry, chemistry, molecular biology, microbiology, cell biology, genomics and recombinant DNA. See for example Sambrook and Green, Molecular Cloning: A Laboratory Manual, 4th Edition (2012); the series Current Protocols in Molecular Biology (F. M. Ausubel, et al. eds.); the series Methods In Enzymology (Academic Press, Inc.), PCR 2: A Practical Approach (M. J. MacPherson, B. D. Hames and G. R. Taylor eds. (1995)), Harlow and Lane, eds. (1988) Antibodies, A Laboratory Manual, and Culture of Animal Cells: A Manual of Basic Technique and Specialized Applications, 6th Edition (R. I. Freshney, ed. (2010)) (which is entirely incorporated by reference herein).

[0302] As used herein, the singular forms “a”, “an” and “the” are intended to include the plural forms as well, unless the context clearly indicates otherwise. Furthermore, to the extent that the terms “including”, “includes”, “having”, “has”, “with”, or variants thereof are used in either the detailed description or the claims, such terms are intended to be inclusive in a manner similar to the term “comprising.”

[0303] The term “about” or “approximately” means within an acceptable error range for the particular value as determined by one of ordinary skill in the art, which will depend in part on how the value is measured or determined, i.e., the limitations of the measurement system. For example, “about” can mean within one or more than one standard deviation, per the practice in the art. Alternatively, “about” can mean a range of up to 20%, up to 15%, up to 10%, up to 5%, or up to 1% of a given value.

[0304] As used herein, a “cell” generally refers to a biological cell. A cell may be the basic structural, functional or biological unit of a living organism. A cell may originate from any organism having one or more cells. Some non-limiting examples include: a prokaryotic cell, eukaryotic cell, a bacterial cell, an archaeal cell, a cell of a single-cell eukaryotic organism, a protozoa cell, a cell from a plant (e.g., cells from plant crops, fruits, vegetables, grains, soy bean, corn, maize, wheat, seeds, tomatoes, rice, cassava, sugarcane, pumpkin, hay, potatoes, cotton, cannabis, tobacco, flowering plants, conifers, gymnosperms, ferns, clubmosses, homworts, liverworts, mosses), an algal cell, (e.g., Botryococcus braunii, Chlamydomonas reinhardtii, Nannochloropsis gaditana, Chlorella pyrenoidosa, Sargassum patens C. Agardh, and the like), seaweeds (e.g., kelp), a fungal cell (e.g., a yeast cell, a cell from a mushroom), an animal cell, a cell from an invertebrate animal (e.g., fruit fly, cnidarian, echinoderm, nematode, etc.), a cell from a vertebrate animal (e.g., fish, amphibian, reptile, bird, mammal), a cell from a mammal (e.g., a pig, a cow, a goat, a sheep, a rodent, a rat, a mouse, a non-human primate, a human, etc.), and etcetera. Sometimes a cell is not originating from a natural organism (e.g., a cell can be a synthetically made, sometimes termed an artificial cell).

[0305] The term “nucleotide,” as used herein, generally refers to a base-sugar-phosphate combination. A nucleotide may comprise a synthetic nucleotide. A nucleotide may comprise a synthetic nucleotide analog. Nucleotides may be monomeric units of a nucleic acid sequence (e.g., deoxyribonucleic acid (DNA) and ribonucleic acid (RNA)). The term nucleotide may include ribonucleoside triphosphates adenosine triphosphate (ATP), uridine triphosphate (UTP), cytosine triphosphate (CTP), guanosine triphosphate (GTP) and deoxyribonucleoside triphosphates such as dATP, dCTP, dITP, dUTP, dGTP, dTTP, or derivatives thereof. Such derivatives may include, for example, [αS]dATP, 7-deaza-dGTP and 7-deaza-dATP, and nucleotide derivatives that confer nuclease resistance on the nucleic acid molecule containing them. The term nucleotide as used herein may refer to dideoxyribonucleoside triphosphates (ddNTPs) and their derivatives. Illustrative examples of dideoxyribonucleoside triphosphates may include, but are not limited to, ddATP, ddCTP, ddGTP, ddITP, and ddTTP. A nucleotide may be unlabeled or detectably labeled, such as using moieties comprising optically detectable moieties (e.g., fluorophores). Labeling may also be carried out with quantum dots. Detectable labels may include, for example, radioactive isotopes, fluorescent labels, chemiluminescent labels, bioluminescent labels and enzyme labels. Fluorescent labels of nucleotides may include but are not limited fluorescein, 5-carboxyfluorescein (FAM), 2′7′-dimethoxy-4′5-dichloro-6-carboxyfluorescein (JOE), rhodamine, 6-carboxyrhodamine (R6G), N,N,N′,N′-tetramethyl-6-carboxyrhodamine (TAMRA), 6-carboxy-X-rhodamine (ROX), 4-(4′dimethylaminophenylazo) benzoic acid (DABCYL), Cascade Blue, Oregon Green, Texas Red, Cyanine and 5-(2′-aminoethyl)aminonaphthalene-1-sulfonic acid (EDANS). Specific examples of fluorescently labeled nucleotides can include [R6G]dUTP, [TAMRA]dUTP, [R110]dCTP, [R6G]dCTP, [TAMRA]dCTP, [JOE]ddATP, [R6G]ddATP, [FAM]ddCTP, [R110]ddCTP, [TAMRA]ddGTP, [ROX]ddTTP, [dR6G]ddATP, [dR110]ddCTP, [dTAMRA]ddGTP, and [dROX]ddTTP available from Perkin Elmer, Foster City, Calif; FluoroLink DeoxyNucleotides, FluoroLink Cy3-dCTP, FluoroLink Cy5-dCTP, FluoroLink Fluor X-dCTP, FluoroLink Cy3-dUTP, and FluoroLink Cy5-dUTP available from Amersham, Arlington Heights, Ill.; Fluorescein-15-dATP, Fluorescein-12-dUTP, Tetramethyl-rodamine-6-dUTP, IR770-9-dATP, Fluorescein-12-ddUTP, Fluorescein-12-UTP, and Fluorescein-15-2′-dATP available from Boehringer Mannheim, Indianapolis, Ind.; and Chromosome Labeled Nucleotides, BODIPY-FL-14-UTP, BODIPY-FL-4-UTP, BODIPY-TMR-14-UTP, BODIPY-TMR-14-dUTP, BODIPY-TR-14-UTP, BODIPY-TR-14-dUTP, Cascade Blue-7-UTP, Cascade Blue-7-dUTP, fluorescein-12-UTP, fluorescein-12-dUTP, Oregon Green 488-5-dUTP, Rhodamine Green-5-UTP, Rhodamine Green-5-dUTP, tetramethylrhodamine-6-UTP, tetramethylrhodamine-6-dUTP, Texas Red-5-UTP, Texas Red-5-dUTP, and Texas Red-12-dUTP available from Molecular Probes, Eugene, Oreg. Nucleotides can also be labeled or marked by chemical modification. A chemically-modified single nucleotide can be biotin-dNTP. Some non-limiting examples of biotinylated dNTPs can include, biotin-dATP (e.g., bio-N6-ddATP, biotin-14-dATP), biotin-dCTP (e.g., biotin-11-dCTP, biotin-14-dCTP), and biotin-dUTP (e.g., biotin-11-dUTP, biotin-16-dUTP, biotin-20-dUTP).

[0306] The terms “polynucleotide,” “oligonucleotide,” and “nucleic acid” are used interchangeably to generally refer to a polymeric form of nucleotides of any length, either deoxyribonucleotides or ribonucleotides, or analogs thereof, either in single-, double-, or multi-stranded form. A polynucleotide may be exogenous or endogenous to a cell. A polynucleotide may exist in a cell-free environment. A polynucleotide may be a gene or fragment thereof. A polynucleotide may be DNA. A polynucleotide may be RNA. A polynucleotide may have any three-dimensional structure and may perform any function. A polynucleotide may comprise one or more analogs (e.g., altered backbone, sugar, or nucleobase). If present, modifications to the nucleotide structure may be imparted before or after assembly of the polymer. Some non-limiting examples of analogs include: 5-bromouracil, peptide nucleic acid, xeno nucleic acid, morpholinos, locked nucleic acids, glycol nucleic acids, threose nucleic acids, dideoxynucleotides, cordycepin, 7-deaza-GTP, fluorophores (e.g., rhodamine or fluorescein linked to the sugar), thiol containing nucleotides, biotin linked nucleotides, fluorescent base analogs, CpG islands, methyl-7-guanosine, methylated nucleotides, inosine, thiouridine, pseudouridine, dihydrouridine, queuosine, and wyosine. Non-limiting examples of polynucleotides include coding or non-coding regions of a gene or gene fragment, loci (locus) defined from linkage analysis, exons, introns, messenger RNA (mRNA), transfer RNA (tRNA), ribosomal RNA (rRNA), short interfering RNA (siRNA), short-hairpin RNA (shRNA), micro-RNA (miRNA), ribozymes, cDNA, recombinant polynucleotides, branched polynucleotides, plasmids, vectors, isolated DNA of any sequence, isolated RNA of any sequence, cell-free polynucleotides including cell-free DNA (cfDNA) and cell-free RNA (cfRNA), nucleic acid probes, and primers. The sequence of nucleotides may be interrupted by non-nucleotide components.

[0307] The terms “transfection” or “transfected” generally refer to introduction of a nucleic acid into a cell by non-viral or viral-based methods. The nucleic acid molecules may be gene sequences encoding complete proteins or functional portions thereof. See, e.g., Sambrook et al., 1989, Molecular Cloning: A Laboratory Manual, 18.1-18.88.

[0308] The terms “peptide,” “polypeptide,” and “protein” are used interchangeably herein to generally refer to a polymer of at least two amino acid residues joined by peptide bond(s). This term does not connote a specific length of polymer, nor is it intended to imply or distinguish whether the peptide is produced using recombinant techniques, chemical or enzymatic synthesis, or is naturally occurring. The terms apply to naturally occurring amino acid polymers as well as amino acid polymers comprising at least one modified amino acid. In some cases, the polymer may be interrupted by non-amino acids. The terms include amino acid chains of any length, including full length proteins, and proteins with or without secondary or tertiary structure (e.g., domains). The terms also encompass an amino acid polymer that has been modified, for example, by disulfide bond formation, glycosylation, lipidation, acetylation, phosphorylation, oxidation, and any other manipulation such as conjugation with a labeling component. The terms “amino acid” and “amino acids,” as used herein, generally refer to natural and non-natural amino acids, including, but not limited to, modified amino acids and amino acid analogues. Modified amino acids may include natural amino acids and non-natural amino acids, which have been chemically modified to include a group or a chemical moiety not naturally present on the amino acid. Amino acid analogues may refer to amino acid derivatives. The term “amino acid” includes both D-amino acids and L-amino acids.

[0309] As used herein, the “non-native” can generally refer to a nucleic acid or polypeptide sequence that is not found in a native nucleic acid or protein. Non-native may refer to affinity tags. Non-native may refer to fusions. Non-native may refer to a naturally occurring nucleic acid or polypeptide sequence that comprises mutations, insertions or deletions. A non-native sequence may exhibit or encode for an activity (e.g., enzymatic activity, methyltransferase activity, acetyltransferase activity, kinase activity, ubiquitinating activity, etc.) that may also be exhibited by the nucleic acid or polypeptide sequence to which the non-native sequence is fused. A non-native nucleic acid or polypeptide sequence may be linked to a naturally-occurring nucleic acid or polypeptide sequence (or a variant thereof) by genetic engineering to generate a chimeric nucleic acid or polypeptide sequence encoding a chimeric nucleic acid or polypeptide.

[0310] The term “promoter”, as used herein, generally refers to the regulatory DNA region which controls transcription or expression of a gene and which may be located adjacent to or overlapping a nucleotide or region of nucleotides at which RNA transcription is initiated. A promoter may contain specific DNA sequences which bind protein factors, often referred to as transcription factors, which facilitate binding of RNA polymerase to the DNA leading to gene transcription. A ‘basal promoter’, also referred to as a ‘core promoter’, may generally refer to a promoter that contains all the basic elements to promote transcriptional expression of an operably linked polynucleotide. Eukaryotic basal promoters can contain a TATA-box or a CAAT box.

[0311] The term “expression”, as used herein, generally refers to the process by which a nucleic acid sequence or a polynucleotide is transcribed from a DNA template (such as into mRNA or other RNA transcript) or the process by which a transcribed mRNA is subsequently translated into peptides, polypeptides, or proteins. Transcripts and encoded polypeptides may be collectively referred to as “gene product.” If the polynucleotide is derived from genomic DNA, expression may include splicing of the mRNA in a eukaryotic cell.

[0312] As used herein, “operably linked”, “operable linkage”, “operatively linked”, or grammatical equivalents thereof generally refer to juxtaposition of genetic elements, e.g., a promoter, an enhancer, a polyadenylation sequence, etc., wherein the elements are in a relationship permitting them to operate in the expected manner. For instance, a regulatory element, which may comprise promoter or enhancer sequences, is operatively linked to a coding region if the regulatory element helps initiate transcription of the coding sequence. There may be intervening residues between the regulatory element and coding region so long as this functional relationship is maintained.

[0313] A “vector” as used herein, generally refers to a macromolecule or association of macromolecules that comprises or associates with a polynucleotide and which may be used to mediate delivery of the polynucleotide to a cell. Examples of vectors include plasmids, viral vectors, liposomes, and other gene delivery vehicles. The vector generally comprises genetic elements, e.g., regulatory elements, operatively linked to a gene to facilitate expression of the gene in a target.

[0314] As used herein, “an expression cassette” and “a nucleic acid cassette” are used interchangeably generally to refer to a combination of nucleic acid sequences or elements that are expressed together or are operably linked for expression. In some cases, an expression cassette refers to the combination of regulatory elements and a gene or genes to which they are operably linked for expression.

[0315] A “functional fragment” of a DNA or protein sequence generally refers to a fragment that retains a biological activity (either functional or structural) that is substantially similar to a biological activity of the full-length DNA or protein sequence. A biological activity of a DNA sequence may be its ability to influence expression in a manner attributed to the full-length sequence.

[0316] As used herein, an “engineered” object generally indicates that the object has been modified by human intervention. According to non-limiting examples: a nucleic acid may be modified by changing its sequence to a sequence that does not occur in nature; a nucleic acid may be modified by ligating it to a nucleic acid that it does not associate with in nature such that the ligated product possesses a function not present in the original nucleic acid; an engineered nucleic acid may synthesized in vitro with a sequence that does not exist in nature; a protein may be modified by changing its amino acid sequence to a sequence that does not exist in nature; an engineered protein may acquire a new function or property. An “engineered” system comprises at least one engineered component.

[0317] As used herein, “synthetic” and “artificial” are used interchangeably to refer to a protein or a domain thereof that has low sequence identity (e.g., less than 50% sequence identity, less than 25% sequence identity, less than 10% sequence identity, less than 5% sequence identity, less than 1% sequence identity) to a naturally occurring human protein. For example, VPR and VP64 domains are synthetic transactivation domains.

[0318] The term “tracrRNA” or “tracr sequence”, as used herein, can generally refer to a nucleic acid with at least about 5%, 10%, 20%, 30%, 40%, 50%, 60%, 70%, 80%, 90%, 95%, or 100% sequence identity or sequence similarity to a wild type example tracrRNA sequence (e.g., a tracrRNA from S. pyogenes S. aureus, etc.). tracrRNA can refer to a nucleic acid with at most about 5%, 10%, 20%, 30%, 40%, 50%, 60%, 70%, 80%, 90%, or 100% sequence identity or sequence similarity to a wild type example tracrRNA sequence (e.g., a tracrRNA from S. pyogenes S. aureus, etc.). tracrRNA may refer to a modified form of a tracrRNA that can comprise a nucleotide change such as a deletion, insertion, or substitution, variant, mutation, or chimera. A tracrRNA may refer to a nucleic acid that can be at least about 60% identical to a wild type example tracrRNA (e.g., a tracrRNA from S. pyogenes S. aureus, etc.) sequence over a stretch of at least 6 contiguous nucleotides. For example, a tracrRNA sequence can be at least about 60% identical, at least about 65% identical, at least about 70% identical, at least about 75% identical, at least about 80% identical, at least about 85% identical, at least about 90% identical, at least about 95% identical, at least about 98% identical, at least about 99% identical, or 100% identical to a wild type example tracrRNA (e.g., a tracrRNA from S. pyogenes S. aureus, etc.) sequence over a stretch of at least 6 contiguous nucleotides. Type II tracrRNA sequences can be predicted on a genome sequence by identifying regions with complementarity to part of the repeat sequence in an adjacent CRISPR array.

[0319] As used herein, a “guide nucleic acid” can generally refer to a nucleic acid that may hybridize to another nucleic acid. A guide nucleic acid may be RNA. A guide nucleic acid may be DNA. The guide nucleic acid may be programmed to bind to a sequence of nucleic acid site-specifically. The nucleic acid to be targeted, or the target nucleic acid, may comprise nucleotides. The guide nucleic acid may comprise nucleotides. A portion of the target nucleic acid may be complementary to a portion of the guide nucleic acid. The strand of a double-stranded target polynucleotide that is complementary to and hybridizes with the guide nucleic acid may be called the complementary strand. The strand of the double-stranded target polynucleotide that is complementary to the complementary strand, and therefore may not be complementary to the guide nucleic acid may be called noncomplementary strand. A guide nucleic acid may comprise a polynucleotide chain and can be called a “single guide nucleic acid.” A guide nucleic acid may comprise two polynucleotide chains and may be called a “double guide nucleic acid.” If not otherwise specified, the term “guide nucleic acid” may be inclusive, referring to both single guide nucleic acids and double guide nucleic acids. A guide nucleic acid may comprise a segment that can be referred to as a “nucleic acid-targeting segment” or a “nucleic acid-targeting sequence.” A nucleic acid-targeting segment may comprise a sub-segment that may be referred to as a “protein binding segment” or “protein binding sequence” or “Cas protein binding segment”.

[0320] The term “sequence identity” or “percent identity” in the context of two or more nucleic acids or polypeptide sequences, generally refers to two (e.g., in a pairwise alignment) or more (e.g., in a multiple sequence alignment) sequences that are the same or have a specified percentage of amino acid residues or nucleotides that are the same, when compared and aligned for maximum correspondence over a local or global comparison window, as measured using a sequence comparison algorithm. Suitable sequence comparison algorithms for polypeptide sequences include, e.g., BLASTP using parameters of a wordlength (W) of 3, an expectation (E) of 10, and the BLOSUM62 scoring matrix setting gap costs at existence of 11, extension of 1, and using a conditional compositional score matrix adjustment for polypeptide sequences longer than 30 residues; BLASTP using parameters of a wordlength (W) of 2, an expectation (E) of 1000000, and the PAM30 scoring matrix setting gap costs at 9 to open gaps and 1 to extend gaps for sequences of less than 30 residues (these are the default parameters for BLASTP in the BLAST suite available at https://blast.ncbi.nlm.nih.gov); CLUSTALW with parameters of; the Smith-Waterman homology search algorithm with parameters of a match of 2, a mismatch of −1, and a gap of −1; MUSCLE with default parameters; MAFFT with parameters retree of 2 and maxiterations of 1000; Novafold with default parameters; HMMER hmmalign with default parameters.

[0321] As used herein, the term “RuvC_III domain” generally refers to a third discontinuous segment of a RuvC endonuclease domain (the RuvC nuclease domain being comprised of three discontiguous segments, RuvC_I, RuvC_II, and RuvC_III). A RuvC domain or segments thereof can generally be identified by alignment to documented domain sequences, structural alignment to proteins with annotated domains, or by comparison to Hidden Markov Models (HMMs) built based on documented domain sequences (e.g., Pfam HMM PF18541 for RuvC III).

[0322] As used herein, the term “HNH domain” generally refers to an endonuclease domain having characteristic histidine and asparagine residues. An HNH domain can generally be identified by alignment to documented domain sequences, structural alignment to proteins with annotated domains, or by comparison to Hidden Markov Models (HMMs) built based on documented domain sequences (e.g., Pfam HMM PF01844 for domain HNH).

[0323] As used herein, the term “base editor” generally refers to an enzyme that catalyzes the conversion of one target base or base pair into another (e.g. A:T to G:C, C:G to T:A) without requiring the creation and repair of a double-strand break. In some embodiments, the base editor is a deaminase.

[0324] As used herein, the term “deaminase” generally refers to a protein or enzyme that catalyzes a deamination reaction. In some embodiments, the deaminase is an adenosine deaminase, which catalyzes the hydrolytic deamination of adenine or adenosine (e.g., an engineered adenosine deaminase that deaminates adenosine in DNA). In some embodiments, the deaminase or deaminase domain is a cytidine (or cytosine) deaminase, catalyzing the hydrolytic deamination of cytidine (or cytosine) or deoxycytidine to uridine (or uracil) or deoxyuridine, respectively. In some embodiments, the deaminase or deaminase domain is a cytidine (or cytosine) deaminase domain, catalyzing the hydrolytic deamination of cytosine (or cytosine) to uracil (or uridine). In some embodiments, the deaminase or deaminase domain is a naturally-occurring deaminase from an organism, such as a human, chimpanzee, gorilla, monkey, cow, dog, rat, mouse, or bacterium (e.g. E. coli). In some embodiments, the deaminase or deaminase domain is a variant of a naturally-occurring deaminase from an organism that does not occur in nature.

[0325] The term “optimally aligned” in the context of two or more nucleic acids or polypeptide sequences, generally refers to two (e.g., in a pairwise alignment) or more (e.g., in a multiple sequence alignment) sequences that have been aligned to maximal correspondence of amino acids residues or nucleotides, for example, as determined by the alignment producing a highest or “optimized” percent identity score.

[0326] Included in the current disclosure are variants of any of the enzymes described herein with one or more conservative amino acid substitutions. Such conservative substitutions can be made in the amino acid sequence of a polypeptide without disrupting the three-dimensional structure or function of the polypeptide. Conservative substitutions can be accomplished by substituting amino acids with similar hydrophobicity, polarity, and R chain length for one another. Additionally, or alternatively, by comparing aligned sequences of homologous proteins from different species, conservative substitutions can be identified by locating amino acid residues that have been mutated between species (e.g., non-conserved residues) without altering the basic functions of the encoded proteins. Such conservatively substituted variants may include variants with at least about 20%, at least about 25%, at least about 30%, at least about 35%, at least about 40%, at least about 45%, at least about 50%, at least about 55%, at least about 60%, at least about 65%, at least about 70%, at least about 75%, at least about 80%, at least about 85%, at least about 90%, at least about 91%, at least about 92%, at least about 93%, at least about 94%, at least about 95%, at least about 96%, at least about 97%, at least about 98%, at least about 99% identity to any one of the endonuclease protein sequences described herein. In some embodiments, such conservatively substituted variants are functional variants. Such functional variants can encompass sequences with substitutions such that the activity of one or more critical active site residues or guide RNA binding residues of the endonuclease are not disrupted.

[0327] Also included in the current disclosure are variants of any of the enzymes described herein with substitution of one or more catalytic residues to decrease or eliminate activity of the enzyme (e.g. decreased-activity variants). In some embodiments, a decreased activity variant as a protein described herein comprises a disrupting substitution of at least one, at least two, or all three catalytic residues. In some embodiments, any of the endonucleases described herein can comprise a nickase mutation. In some embodiments, any of the endonucleases described herein can comprise a RuvC domain lacking nuclease activity. In some embodiments, any of the endonucleases described herein can be configured to cleave one strand of a double-stranded target deoxyribonucleic acid. In some embodiments, any of the endonucleases described herein can comprise can be configured to lack endonuclease activity or be catalytically dead.

[0328] Conservative substitution tables providing functionally similar amino acids are available from a variety of references (see, for e.g., Creighton, Proteins: Structures and Molecular Properties (W H Freeman & Co.; 2nd edition (December 1993)). The following eight groups each contain amino acids that are conservative substitutions for one another:
[0329] 1) Alanine (A), Glycine (G);
[0330] 2) Aspartic acid (D), Glutamic acid (E);
[0331] 3) Asparagine (N), Glutamine (Q);
[0332] 4) Arginine (R), Lysine (K);
[0333] 5) Isoleucine (I), Leucine (L), Methionine (M), Valine (V);
[0334] 6) Phenylalanine (F), Tyrosine (Y), Tryptophan (W);
[0335] 7) Serine (S), Threonine (T); and
[0336] 8) Cysteine (C), Methionine (M)

### Overview

[0337] The discovery of new CRISPR enzymes with unique functionality and structure may offer the potential to further disrupt deoxyribonucleic acid (DNA) editing technologies, improving speed, specificity, functionality, and ease of use. Relative to the predicted prevalence of Clustered Regularly Interspaced Short Palindromic Repeats (CRISPR) systems in microbes and the sheer diversity of microbial species, comparatively few functionally characterized CRISPR enzymes exist in the literature. This is partly because a huge number of microbial species may not be readily cultivated in laboratory conditions. Metagenomic sequencing from natural environmental niches that represent large numbers of microbial species may offer the potential to drastically increase the number of new CRISPR systems documented and speed the discovery of new oligonucleotide editing functionalities. A recent example of the fruitfulness of such an approach is demonstrated by the 2016 discovery of CasX/CasY CRISPR systems from metagenomic analysis of natural microbial communities.

[0338] CRISPR systems are RNA-directed nuclease complexes that have been described to function as an adaptive immune system in microbes. In their natural context, CRISPR systems occur in CRISPR (clustered regularly interspaced short palindromic repeats) operons or loci, which generally comprise two parts: (i) an array of short repetitive sequences (30-40 bp) separated by equally short spacer sequences, which encode the RNA-based targeting element; and (ii) ORFs encoding the nuclease polypeptide directed by the RNA-based targeting element alongside accessory proteins/enzymes. Efficient nuclease targeting of a particular target nucleic acid sequence generally requires both (i) complementary hybridization between the first 6-8 nucleic acids of the target (the target seed) and the crRNA guide; and (ii) the presence of a protospacer-adjacent motif (PAM) sequence within a defined vicinity of the target seed (the PAM usually being a sequence not commonly represented within the host genome). Depending on the exact function and organization of the system, CRISPR systems are commonly organized into 2 classes, 5 types and 16 subtypes based on shared functional characteristics and evolutionary similarity (see FIG. 1).

[0339] Class I CRISPR systems have large, multisubunit effector complexes, and comprise Types I, III, and IV.

[0340] Type I CRISPR systems are considered of moderate complexity in terms of components. In Type I CRISPR systems, the array of RNA-targeting elements is transcribed as a long precursor crRNA (pre-crRNA) that is processed at repeat elements to liberate short, mature crRNAs that direct the nuclease complex to nucleic acid targets when they are followed by a suitable short consensus sequence called a protospacer-adjacent motif (PAM). This processing occurs via an endoribonuclease subunit (Cas6) of a large endonuclease complex called Cascade, which also comprises a nuclease (Cas3) protein component of the crRNA-directed nuclease complex. Type I nucleases function primarily as DNA nucleases.

[0341] Type III CRISPR systems may be characterized by the presence of a central nuclease, known as Cas10, alongside a repeat-associated mysterious protein (RAMP) that comprises Csm or Cmr protein subunits. Like in Type I systems, the mature crRNA is processed from a pre-crRNA using a Cas6-like enzyme. Unlike type I and II systems, type III systems appear to target and cleave DNA-RNA duplexes (such as DNA strands being used as templates for an RNA polymerase).

[0342] Type IV CRISPR systems possess an effector complex that comprises a highly reduced large subunit nuclease (csf1), two genes for RAMP proteins of the Cas5 (csf3) and Cas7 (csf2) groups, and, in some cases, a gene for a predicted small subunit; such systems are commonly found on endogenous plasmids.

[0343] Class II CRISPR systems generally have single-polypeptide multidomain nuclease effectors, and comprise Types II, V and VI.

[0344] Type II CRISPR systems are considered the simplest in terms of components. In Type II CRISPR systems, the processing of the CRISPR array into mature crRNAs does not require the presence of a special endonuclease subunit, but rather a small trans-encoded crRNA (tracrRNA) with a region complementary to the array repeat sequence; the tracrRNA interacts with both its corresponding effector nuclease (e.g. Cas9) and the repeat sequence to form a precursor dsRNA structure, which is cleaved by endogenous RNAse III to generate a mature effector enzyme loaded with both tracrRNA and crRNA. Type II nucleases are known as DNA nucleases. Type 2 effectors generally exhibit a structure comprising a RuvC-like endonuclease domain that adopts the RNase H fold with an unrelated HNH nuclease domain inserted within the folds of the RuvC-like nuclease domain. The RuvC-like domain is responsible for the cleavage of the target (e.g., crRNA complementary) DNA strand, while the HNH domain is responsible for cleavage of the displaced DNA strand.

[0345] Type V CRISPR systems are characterized by a nuclease effector (e.g. Cas12) structure similar to that of Type II effectors, comprising a RuvC-like domain. Similar to Type II, most (but not all) Type V CRISPR systems use a tracrRNA to process pre-crRNAs into mature crRNAs; however, unlike Type II systems which requires RNAse III to cleave the pre-crRNA into multiple crRNAs, type V systems are capable of using the effector nuclease itself to cleave pre-crRNAs. Like Type-II CRISPR systems, Type V CRISPR systems are again known as DNA nucleases. Unlike Type II CRISPR systems, some Type V enzymes (e.g., Cas12a) appear to have a robust single-stranded nonspecific deoxyribonuclease activity that is activated by the first crRNA directed cleavage of a double-stranded target sequence.

[0346] Type VI CRISPR systems have RNA-guided RNA endonucleases. Instead of RuvC-like domains, the single polypeptide effector of Type VI systems (e.g. Cas13) comprises two HEPN ribonuclease domains. Differing from both Type II and V systems, Type VI systems also may not require a tracrRNA in some instances for processing of pre-crRNA into crRNA. Similar to type V systems, however, some Type VI systems (e.g., C2C2) appear to possess robust single-stranded nonspecific nuclease (ribonuclease) activity activated by the first crRNA directed cleavage of a target RNA.

[0347] Because of their simpler architecture, Class II CRISPR have been most widely adopted for engineering and development as designer nuclease/genome editing applications.

[0348] One of the early adaptations of such a system for in vitro use can be found in Jinek et al. (Science. 2012 Aug. 17; 337(6096):816-21, which is entirely incorporated herein by reference). The Jinek study first described a system that involved (i) recombinantly-expressed, purified full-length Cas9 (e.g., a Class II, Type II enzyme) isolated from S. pyogenes SF370, (ii) purified mature ˜42 nt crRNA bearing a ˜20 nt 5′ sequence complementary to the target DNA sequence to be cleaved followed by a 3′ tracr-binding sequence (the whole crRNA being in vitro transcribed from a synthetic DNA template carrying a T7 promoter sequence); (iii) purified tracrRNA in vitro transcribed from a synthetic DNA template carrying a T7 promoter sequence, and (iv) Mg²⁺. Jinek later described an improved, engineered system wherein the crRNA of (ii) is joined to the 5′ end of (iii) by a linker (e.g., GAAA) to form a single fused synthetic guide RNA (sgRNA) capable of directing Cas9 to a target by itself.

[0349] Mali et al. (Science. 2013 Feb. 15; 339(6121): 823-826), which is entirely incorporated herein by reference, later adapted this system for use in mammalian cells by providing DNA vectors encoding (i) an ORF encoding codon-optimized Cas9 (e.g., a Class II, Type II enzyme) under a suitable mammalian promoter with a C-terminal nuclear localization sequence (e.g., SV40 NLS) and a suitable polyadenylation signal (e.g., TK pA signal); and (ii) an ORF encoding an sgRNA (having a 5′ sequence beginning with G followed by 20 nt of a complementary targeting nucleic acid sequence joined to a 3′ tracr-binding sequence, a linker, and the tracrRNA sequence) under a suitable Polymerase III promoter (e.g., the U6 promoter).

### Base Editing

[0350] Base editing is the conversion of one target base or base pair into another (e.g. A:T to G: C, C:G to T:A) without requiring the creation and repair of a double-strand break. The base editing may be achieved with the help of DNA and RNA base editors that allow the introduction of point mutations at specific sites, in either DNA or RNA. Generally, DNA base editors may comprise a fusion of a catalytically inactive nuclease and a catalytically active base-modification enzyme that acts on single-stranded DNAs (ssDNAs). RNA base editors may comprise of similar, RNA-specific enzymes. Base editing may increase the efficiency of gene modification, while reducing the off-target and random mutations in the DNA.

[0351] DNA base editors are engineered ribonucleoprotein complexes that act as tools for single base substitution in cells and organism. They may be created by fusing an engineered base-modification enzyme and a catalytically deficient CRISPR endonuclease variant that cannot cut dsDNA, but it is able to unfold the dsDNA in a protospacer adjacent motif (PAM) sequence-dependent manner, such that a guide RNA can find its complementary target to indicate a ssDNA scission site. The guide RNA anneals to the complementary DNA, displacing a fragment of ssDNA and directing the CRISPR ‘scissors’ to the base modification site. The cellular repair machinery will repair the nicked non-edited strand using information from the complementary edited template.

[0352] So far, two types of DNA editors, cytosine base (CBEs) and adenine base editors (ABEs) have been developed. They were shown to efficiently and precisely edit point mutations in DNA with minimal off-target DNA editing (see Nat Biotechnol. 2017; 35:435-437, Nat Biotechnol. 2017; 35:438-440 and Nat Biotechnol. 2017; 35:475-480, each of which is entirely incorporated herein by reference). However, recent findings indicate that off-target modifications are present in DNA, and that many off-target modifications are also introduced into RNA by DNA base editors.

### MG Base Editors

[0353] In some aspects, the present disclosure provides for an engineered nucleic acid editing system, comprising: (a) an endonuclease comprising a RuvC domain and an HNH domain, wherein the endonuclease is derived from an uncultivated microorganism, wherein the endonuclease is a class 2, type II endonuclease, and wherein the endonuclease is configured to be deficient in nuclease activity; (b) a base editor coupled to the endonuclease; and (c) an engineered guide ribonucleic acid structure configured to form a complex with the endonuclease comprising: (i) a guide ribonucleic acid sequence configured to hybridize to a target deoxyribonucleic acid sequence; and (ii) a ribonucleic acid sequence configured to bind to the endonuclease. In some embodiments, the endonuclease comprises a sequence with at least 80%, at least 81%, at least 82%, at least 83%, at least 84%, at least 85%, at least 86%, at least 87%, at least 88%, at least 89%, at least 90%, at least 91%, at least 92%, at least 93%, at least 94%, at least 95%, at least 96%, at least 97%, at least 98%, at least 99%, or 100% sequence identity to any one of SEQ ID NOs:70-78 or 597, or a variant thereof. In some cases, the RuvC domain lacks nuclease activity. In some cases, the endonuclease comprises a nickase mutation. In some cases, the endonuclease is configured to cleave one strand of a double-stranded target deoxyribonucleic acid. In some cases the ribonucleic acid sequence configured to bind to the endonuclease comprises a tracr sequence.

[0354] In some aspects, the present disclosure provides for an engineered nucleic acid editing system comprising: (a) an endonuclease having at least 80%, at least 81%, at least 82%, at least 83%, at least 84%, at least 85%, at least 86%, at least 87%, at least 88%, at least 89%, at least 90%, at least 91%, at least 92%, at least 93%, at least 94%, at least 95%, at least 96%, at least 97%, at least 98%, at least 99%, or 100% sequence identity to any one of SEQ ID NOs:70-78 or 597, or a variant thereof, wherein the endonuclease is configured to be deficient in nuclease activity; a base editor coupled to the endonuclease; and an engineered guide ribonucleic acid structure configured to form a complex with the endonuclease comprising: (i) a guide ribonucleic acid sequence configured to hybridize to a target deoxyribonucleic acid sequence; and (ii) a ribonucleic acid sequence configured to bind to the endonuclease. In some cases the ribonucleic acid sequence configured to bind to the endonuclease comprises a tracr sequence. In some cases, the RuvC domain lacks nuclease activity. In some cases, the endonuclease comprises a nickase mutation. In some cases, the endonuclease is configured to cleave one strand of a double-stranded target deoxyribonucleic acid.

[0355] In some aspects, the present disclosure provides for an engineered nucleic acid editing system comprising: (a) an endonuclease configured to bind to a protospacer adjacent motif (PAM) sequence comprising any one of Sequence Numbers: A360-A368 or A598, wherein the endonuclease is a class 2, type II endonuclease, and the endonuclease is configured to be deficient in nuclease activity; and (b) a base editor coupled to the endonuclease; and (c) an engineered guide ribonucleic acid structure configured to form a complex with the endonuclease comprising: (i) a guide ribonucleic acid sequence configured to hybridize to a target deoxyribonucleic acid sequence; and (ii) a ribonucleic acid sequence configured to bind to the endonuclease. In some cases, the ribonucleic acid sequence configured to bind to the endonuclease comprises a tracr sequence. In some cases, the endonuclease comprises a nickase mutation. In some cases, the RuvC domain lacks nuclease activity. In some cases, the endonuclease is configured to cleave one strand of a double-stranded target deoxyribonucleic acid.

[0356] In some embodiments, the endonuclease is derived from an uncultivated microorganism. In some embodiments, the endonuclease has less than 80% identity to a Cas9 endonuclease. In some embodiments, the endonuclease further comprises an HNH domain. In some embodiments, the tracr ribonucleic acid sequence comprises a sequence with at least 80%, at least 81%, at least 82%, at least 83%, at least 84%, at least 85%, at least 86%, at least 87%, at least 88%, at least 89%, at least 90%, at least 91%, at least 92%, at least 93%, at least 94%, at least 95%, at least 96%, at least 97%, at least 98%, at least 99%, or 100% sequence identity to about 60 to 90 consecutive nucleotides selected from any one of SEQ ID NOs: 88-96, 488-489, or 679-680, or a variant thereof. In some embodiments, the tracr ribonucleic acid sequence comprises a sequence with at least 80%, at least 81%, at least 82%, at least 83%, at least 84%, at least 85%, at least 86%, at least 87%, at least 88%, at least 89%, at least 90%, at least 91%, at least 92%, at least 93%, at least 94%, at least 95%, at least 96%, at least 97%, at least 98%, at least 99%, or 100% sequence identity non-degenerate nucleotides of any one of SEQ ID NOs: 88-96, 488-489, or 679-680, or a variant thereof.

[0357] In some aspects, the present disclosure provides an engineered nucleic acid editing system comprising, (a) an engineered guide ribonucleic acid structure comprising: (i) a guide ribonucleic acid sequence configured to hybridize to a target deoxyribonucleic acid sequence; and (ii) a tracr ribonucleic acid sequence configured to bind to an endonuclease, wherein the tracr ribonucleic acid sequence comprises a sequence with at least 80%, at least 81%, at least 82%, at least 83%, at least 84%, at least 85%, at least 86%, at least 87%, at least 88%, at least 89%, at least 90%, at least 91%, at least 92%, at least 93%, at least 94%, at least 95%, at least 96%, at least 97%, at least 98%, at least 99%, or 100% sequence identity non-degenerate nucleotides of any one of SEQ ID NOs: 88-96, 488-489, or 679-680, or a variant thereof; and a class 2, type II endonuclease configured to bind to the engineered guide ribonucleic acid.

[0358] In some embodiments, the endonuclease is configured to bind to a protospacer adjacent motif (PAM) sequence comprising any one of Sequence Numbers: A360, A362, or A368. In some embodiments, the base editor comprises a sequence with at least 80%, at least 81%, at least 82%, at least 83%, at least 84%, at least 85%, at least 86%, at least 87%, at least 88%, at least 89%, at least 90%, at least 91%, at least 92%, at least 93%, at least 94%, at least 95%, at least 96%, at least 97%, at least 98%, at least 99%, or 100% sequence identity to any one of SEQ ID NOs: 1-51, 57-66, 385-443, 444-475, 594-595, or 599-675, or a variant thereof. In some embodiments, the base editor is an adenine deaminase. In some embodiments, the adenosine deaminase comprises a sequence with at least 80%, at least 81%, at least 82%, at least 83%, at least 84%, at least 85%, at least 86%, at least 87%, at least 88%, at least 89%, at least 90%, at least 91%, at least 92%, at least 93%, at least 94%, at least 95%, at least 96%, at least 97%, at least 98%, at least 99%, or 100% sequence identity to SEQ ID NOs: 50-51, 57, 385-443, 448-475, or 595, or a variant thereof. In some embodiments, the base editor is a cytosine deaminase. In some embodiments, the cytosine deaminase comprises a sequence with at least 80%, at least 81%, at least 82%, at least 83%, at least 84%, at least 85%, at least 86%, at least 87%, at least 88%, at least 89%, at least 90%, at least 91%, at least 92%, at least 93%, at least 94%, at least 95%, at least 96%, at least 97%, at least 98%, at least 99%, or 100% sequence identity to any one of SEQ ID NOs: 1-49, 444-447, 594, or 58-66, or a variant thereof.

[0359] In some embodiments, the engineered nucleic acid editing system further comprises a uracil DNA glycosylase inhibitor. In some embodiments, the uracil DNA glycosylase inhibitor comprises a sequence with at least 80%, at least 81%, at least 82%, at least 83%, at least 84%, at least 85%, at least 86%, at least 87%, at least 88%, at least 89%, at least 90%, at least 91%, at least 92%, at least 93%, at least 94%, at least 95%, at least 96%, at least 97%, at least 98%, at least 99%, or 100% sequence identity to any one of SEQ ID NOs: 52-56 or SEQ ID NO: 67, or a variant thereof.

[0360] In some embodiments, the engineered guide ribonucleic acid structure comprises at least two ribonucleic acid polynucleotides. In some embodiments, the engineered guide ribonucleic acid structure comprises one ribonucleic acid polynucleotide comprising the guide ribonucleic acid sequence and the tracr ribonucleic acid sequence. In some embodiments, the guide ribonucleic acid sequence is complementary to a prokaryotic, bacterial, archaeal, eukaryotic, fungal, plant, mammalian, or human genomic sequence. In some embodiments, the guide ribonucleic acid sequence is 15-24 nucleotides in length. In some embodiments, the endonuclease comprises one or more nuclear localization sequences (NLSs) proximal to an N- or C-terminus of the endonuclease.

[0361] The NLS can comprise any of the sequences in Table 1 below, or a combination thereof:

TABLE 1
Example NLS Sequences that can be used with Effectors According to the
Disclosure

| Source | NLS amino acid sequence | SEQ ID NO: |
|---|---|---|
| SV40 | PKKKRKV | 369 |
| nucleoplasmin bipartite NLS | KRPAATKKAGQAKKKK | 370 |
| c-myc NLS | PAAKRVKLD | 371 |
| c-myc NLS | RQRRNELKRSP | 372 |
| hRNPA1 M9 NLS | NQSSNFGPMKGGNFGGRSSGPYGGGGQYFAKPRNQG | 373 |
| | GY | |
| Importin-alpha IBB domain | RMRIZFKNKGKDTAELRRRRVEVSVELRKAKKDEQIL | 374 |
| | KRRNV | |
| Myoma T protein | VSRKRPRP | 375 |
| Myoma T protein | PPKKARED | 376 |
| p53 | PQPKKKPL | 377 |
| mouse c-abl IV | SALIKKKKKMAP | 378 |
| influenza virus NS1 | DRLRR | 379 |
| influenza virus NS1 | PKQKKRK | 380 |
| Hepatitis virus delta antigen | RKLKKKIKKL | 381 |
| mouse Mx1 protein | REKKKFLKRR | 382 |
| human poly (ADP-ribose) | KRKGDEVDGVDEVAKKKSKK | 383 |
| polymerase | | |
| steroid hormone receptor (human) | RKCLQAGMNLEARKTKK | 384 |
| glucocorticoid | | |

[0362] In some embodiments, the endonuclease is covalently coupled directly to the base editor or covalently coupled to the base editor through a linker. In some embodiments, linkers joining any of the enzymes or domains described herein can comprise one or multiple copies of a sequence having at least 80%, at least 81%, at least 82%, at least 83%, at least 84%, at least 85%, at least 86%, at least 87%, at least 88%, at least 89%, at least 90%, at least 91%, at least 92%, at least 93%, at least 94%, at least 95%, at least 96%, at least 97%, at least 98%, at least 99%, or 100% sequence identity to SGGSSGGSSGSETPGTSESATPESSGGSSGGS, SGSETPGTSESATPESA, GSGGS, SGSETPGTSESATPES, SGGSS, or GAAA, or any other linker sequence described herein. In some embodiments, a polypeptide comprises the endonuclease and the base editor. In some embodiments, the endonuclease is configured to cleave one strand of a double-stranded target deoxyribonucleic acid. In some embodiments, the endonuclease comprises a sequence having at least 80%, at least 81%, at least 82%, at least 83%, at least 84%, at least 85%, at least 86%, at least 87%, at least 88%, at least 89%, at least 90%, at least 91%, at least 92%, at least 93%, at least 94%, at least 95%, at least 96%, at least 97%, at least 98%, at least 99%, or 100% sequence identity to any one of SEQ ID NOs:70-78 or 597, or a variant thereof. In some embodiments, the system further comprises a source of Mg²⁺.

[0363] In some embodiments, the endonuclease comprises a sequence at least 70%, at least 80%, or at least 90% identical to SEQ ID NO: 70, or a variant thereof; the guide RNA structure comprises a sequence at least 70%, at least 80%, or at least 90% identical to at least one of SEQ ID NO: 88; and the endonuclease is configured to bind to a PAM comprising Sequence Number: A360.

[0364] In some embodiments, the endonuclease comprises a sequence at least 70%, at least 80%, or at least 90% identical to SEQ ID NO: 71, or a variant thereof; the guide RNA structure comprises a sequence at least 70%, at least 80%, or at least 90% identical to at least one of SEQ ID NO: 89; and the endonuclease is configured to bind to a PAM comprising Sequence Number: A361.

[0365] In some embodiments, the endonuclease comprises a sequence at least 70%, at least 80%, or at least 90% identical to SEQ ID NO: 73, or a variant thereof; the guide RNA structure comprises a sequence at least 70%, at least 80%, or at least 90% identical to at least one of SEQ ID NO: 91; and the endonuclease is configured to bind to a PAM comprising Sequence Number: A363.

[0366] In some embodiments, the endonuclease comprises a sequence at least 70%, at least 80%, or at least 90% identical to SEQ ID NO: 75, or a variant thereof; the guide RNA structure comprises a sequence at least 70%, at least 80%, or at least 90% identical to at least one of SEQ ID NO: 93; and the endonuclease is configured to bind to a PAM comprising Sequence Number: A365.

[0367] In some embodiments, the endonuclease comprises a sequence at least 70%, at least 80%, or at least 90% identical to SEQ ID NO: 76, or a variant thereof; the guide RNA structure comprises a sequence at least 70%, at least 80%, or at least 90% identical to at least one of SEQ ID NO: 94; and the endonuclease is configured to bind to a PAM comprising Sequence Number: A366.

[0368] In some embodiments, the endonuclease comprises a sequence at least 70%, at least 80%, or at least 90% identical to SEQ ID NO: 77, or a variant thereof; the guide RNA structure comprises a sequence at least 70%, at least 80%, or at least 90% identical to at least one of SEQ ID NO: 95; and the endonuclease is configured to bind to a PAM comprising Sequence Number: A367.

[0369] In some embodiments, the endonuclease comprises a sequence at least 70%, at least 80%, or at least 90% identical to SEQ ID NO: 78, or a variant thereof; the guide RNA structure comprises a sequence at least 70%, at least 80%, or at least 90% identical to at least one of SEQ ID NO: 96; and the endonuclease is configured to bind to a PAM comprising Sequence Number: A368.

[0370] In some embodiments, the base editor comprises an adenine deaminase. In some embodiments, the adenine deaminase comprises SEQ ID NO: 57, or a variant thereof. In some embodiments, the base editor comprises a cytosine deaminase. In some embodiments, the cytosine deaminase comprises SEQ ID NO: 58, or a variant thereof. In some embodiments, the engineered nucleic acid editing system described herein further comprises a uracil DNA glycosylation inhibitor. In some embodiments, the uracil DNA glycosylation inhibitor comprises SEQ ID NO: 67, or a variant thereof.

[0371] In some embodiments, the sequence identity is determined by a BLASTP, CLUSTALW, MUSCLE, MAFFT, or Smith-Waterman homology search algorithm. In some embodiments, the sequence identity is determined by said BLASTP homology search algorithm using parameters of a wordlength (W) of 3, an expectation (E) of 10, and a BLOSUM62 scoring matrix setting gap costs at existence of 11, extension of 1, and using a conditional compositional score matrix adjustment.

[0372] In some aspects, the present disclosure provides a nucleic acid comprising an engineered nucleic acid sequence optimized for expression in an organism, wherein the nucleic acid encodes a class 2, type II endonuclease coupled to a base editor, and wherein the endonuclease is derived from an uncultivated microorganism.

[0373] In some aspects, the present disclosure provides a nucleic acid comprising an engineered nucleic acid sequence optimized for expression in an organism, wherein the nucleic acid encodes an endonuclease having at least 70%, at least 80%, at least 81%, at least 82%, at least 83%, at least 84%, at least 85%, at least 86%, at least 87%, at least 88%, at least 89%, at least 90%, at least 91%, at least 92%, at least 93%, at least 94%, at least 95%, at least 96%, at least 97%, at least 98%, at least 99%, or 100% sequence identity to any one of SEQ ID NOs:70-78 or 597, or a variant thereof coupled to a base editor. In some embodiments, the endonuclease comprises a sequence encoding one or more nuclear localization sequences (NLSs) proximal to an N- or C-terminus of said endonuclease. In some embodiments, the organism is prokaryotic, bacterial, eukaryotic, fungal, plant, mammalian, rodent, or human.

[0374] In some aspects, the present disclosure provides a vector comprising a nucleic acid sequence encoding a class 2, type II endonuclease coupled to a base editor, wherein said endonuclease is derived from an uncultivated microorganism. In some embodiments, the vector comprises the nucleic acid described herein. In some embodiments, the vector further comprises a nucleic acid encoding an engineered guide ribonucleic acid structure configured to form a complex with the endonuclease comprising: a guide ribonucleic acid sequence configured to hybridize to a target deoxyribonucleic acid sequence; and a tracr ribonucleic acid sequence configured to binding to the endonuclease. In some embodiments, the vector is a plasmid, a minicircle, a CELiD, an adeno-associated virus (AAV) derived virion, or a lentivirus. In some aspects, the present disclosure provides a cell comprising the vector described herein. In some aspects, the present disclosure provides a method of manufacturing an endonuclease, comprising cultivating the cell described herein.

[0375] In some aspects, the present disclosure provides a method for modifying a double-stranded deoxyribonucleic acid polynucleotide comprising contacting the double-stranded deoxyribonucleic acid polynucleotide with a complex comprising: an endonuclease comprising a RuvC domain and an HNH domain, wherein the endonuclease is derived from an uncultivated microorganism, wherein the endonuclease is a class 2, type II endonuclease, and wherein the RuvC domain lacks nuclease activity; a base editor coupled to the endonuclease; and an engineered guide ribonucleic acid structure configured to bind to the endonuclease and the double-stranded deoxyribonucleic acid polynucleotide; wherein the double-stranded deoxyribonucleic acid polynucleotide comprises a protospacer adjacent motif (PAM).

[0376] In some embodiments, the endonuclease comprising a RuvC domain and an HNH domain is covalently coupled directly to the base editor or covalently coupled to the base editor through a linker. In some embodiments, the endonuclease comprising a RuvC domain and an HNH domain comprises a sequence with at least 80%, at least 81%, at least 82%, at least 83%, at least 84%, at least 85%, at least 86%, at least 87%, at least 88%, at least 89%, at least 90%, at least 91%, at least 92%, at least 93%, at least 94%, at least 95%, at least 96%, at least 97%, at least 98%, at least 99%, or 100% sequence identity to any one of SEQ ID NOs:70-78 or 597, or a variant thereof.

[0377] In some aspects, the present disclosure provides a method for modifying a double-stranded deoxyribonucleic acid polynucleotide, comprising contacting the double-stranded deoxyribonucleic acid polynucleotide with a complex comprising: a class 2, type II endonuclease, a base editor coupled to the endonuclease, and an engineered guide ribonucleic acid structure configured to bind to the endonuclease and the double-stranded deoxyribonucleic acid polynucleotide; wherein the double-stranded deoxyribonucleic acid polynucleotide comprises a protospacer adjacent motif (PAM); and wherein the PAM comprises a sequence selected from the group consisting of Sequence Numbers: A360-A368 or A598, or a variant thereof.

[0378] In some embodiments, the class 2, type II endonuclease is covalently coupled to the base editor or coupled to the base editor through a linker. In some embodiments, the base editor comprises a sequence with at least 80%, at least 81%, at least 82%, at least 83%, at least 84%, at least 85%, at least 86%, at least 87%, at least 88%, at least 89%, at least 90%, at least 91%, at least 92%, at least 93%, at least 94%, at least 95%, at least 96%, at least 97%, at least 98%, at least 99%, or 100% sequence identity to a sequence selected from SEQ ID NOs: 1-51, 57-66, 385-443, 444-475, 594-595, or 599-675, or a variant thereof. In some embodiments, the base editor comprises an adenine deaminase; the double-stranded deoxyribonucleic acid polynucleotide comprises an adenine; and modifying the double-stranded deoxyribonucleic acid polypeptide comprises converting the adenine to guanine. In some embodiments, the adenine deaminase comprises a sequence with at least 95% identity to SEQ ID NO: 57, or a variant thereof.

[0379] In some embodiments, the base editor comprises a cytosine deaminase; the double-stranded deoxyribonucleic acid polynucleotide comprises a cytosine; and modifying the double-stranded deoxyribonucleic acid polypeptide comprises converting the cytosine to uracil. In some embodiments, the cytosine deaminase comprises a sequence with at least 95% identity to SEQ ID NO: 58, or a variant thereof. In some embodiments, the cytosine deaminase comprises a sequence with at least 95% identity to any one of SEQ ID NOs: 59-66, or a variant thereof.

[0380] In some embodiments, the complex further comprises a uracil DNA glycosylase inhibitor. In some embodiments, the uracil DNA glycosylase inhibitor comprises a sequence with at least 70%, 80%, 90% or 95% identity to any one of SEQ ID NOs: 52-56 or SEQ ID NO: 67, or a variant thereof. In some embodiments, the double-stranded deoxyribonucleic acid polynucleotide comprises a first strand comprising a sequence complementary to a sequence of the engineered guide ribonucleic acid structure and a second strand comprising said PAM. In some embodiments, the PAM is directly adjacent to the 3′ end of the sequence complementary to the sequence of the engineered guide ribonucleic acid structure.

[0381] In some embodiments, the class 2, type II endonuclease is not a Cas9 endonuclease, a Cas14 endonuclease, a Cas12a endonuclease, a Cas12b endonuclease, a Cas 12c endonuclease, a Cas12d endonuclease, a Cas12e endonuclease, a Cas13a endonuclease, a Cas13b endonuclease, a Cas13c endonuclease, or a Cas 13d endonuclease. In some embodiments, the class 2, type II endonuclease is derived from an uncultivated microorganism. In some embodiments, the double-stranded deoxyribonucleic acid polynucleotide is a eukaryotic, plant, fungal, mammalian, rodent, or human double-stranded deoxyribonucleic acid polynucleotide.

[0382] In some aspects, the present disclosure provides a method of modifying a target nucleic acid locus, said method comprising delivering to said target nucleic acid locus the engineered nucleic acid editing system described herein, wherein the endonuclease is configured to form a complex with the engineered guide ribonucleic acid structure, and wherein the complex is configured such that upon binding of the complex to the target nucleic acid locus, the complex modifies a nucleotide of the target nucleic locus.

[0383] In some embodiments, the engineered nucleic acid editing system comprises an adenine deaminase, the nucleotide is an adenine, and modifying the target nucleic acid locus comprises converting the adenine to a guanine. In some embodiments, the engineered nucleic acid editing system comprises a cytidine deaminase and a uracil DNA glycosylase inhibitor, the nucleotide is a cytosine and modifying the target nucleic acid locus comprises converting the adenine to a uracil. In some embodiments, the target nucleic acid locus comprises genomic DNA, viral DNA, or bacterial DNA. In some embodiments, the target nucleic acid locus is in vitro. In some embodiments, the target nucleic acid locus is within a cell. In some embodiments, the cell is a prokaryotic cell, a bacterial cell, a eukaryotic cell, a fungal cell, a plant cell, an animal cell, a mammalian cell, a rodent cell, a primate cell, or a human cell. In some embodiments, the cell is within an animal.

[0384] In some embodiments, the cell is within a cochlea. In some embodiments, the cell is within an embryo. In some embodiments, the embryo is a two-cell embryo. In some embodiments, the embryo is a mouse embryo. In some embodiments, delivering the engineered nucleic acid editing system to the target nucleic acid locus comprises delivering the nucleic acid described herein or the vector described herein. In some embodiments, delivering the engineered nucleic acid editing system to the target nucleic acid locus comprises delivering a nucleic acid comprising an open reading frame encoding the endonuclease.

[0385] In some embodiments, the nucleic acid comprises a promoter to which the open reading frame encoding the endonuclease is operably linked. In some embodiments, delivering the engineered nucleic acid editing system to said target nucleic acid locus comprises delivering a capped mRNA containing the open reading frame encoding the endonuclease. In some embodiments, delivering the engineered nucleic acid editing system to the target nucleic acid locus comprises delivering a translated polypeptide. In some embodiments, delivering the engineered nucleic acid editing system to the target nucleic acid locus comprises delivering a deoxyribonucleic acid (DNA) encoding the engineered guide ribonucleic acid structure operably linked to a ribonucleic acid (RNA) pol III promoter.

[0386] In some aspects, the present disclosure provides an engineered nucleic acid editing polypeptide, comprising: an endonuclease comprising a RuvC domain and an HNH domain, wherein the endonuclease is derived from an uncultivated microorganism, wherein the endonuclease is a class 2, type II endonuclease, and wherein the endonuclease is configured to be deficient in nuclease activity. In some embodiments, the endonuclease comprises a sequence with at least 80%, at least 81%, at least 82%, at least 83%, at least 84%, at least 85%, at least 86%, at least 87%, at least 88%, at least 89%, at least 90%, at least 91%, at least 92%, at least 93%, at least 94%, at least 95%, at least 96%, at least 97%, at least 98%, at least 99%, or 100% sequence identity to any one of SEQ ID NOs:70-78 or 597, or a variant thereof.

[0387] In some aspects, the present disclosure provides an engineered nucleic acid editing polypeptide, comprising: an endonuclease having at least 80%, at least 81%, at least 82%, at least 83%, at least 84%, at least 85%, at least 86%, at least 87%, at least 88%, at least 89%, at least 90%, at least 91%, at least 92%, at least 93%, at least 94%, at least 95%, at least 96%, at least 97%, at least 98%, at least 99%, or 100% sequence identity to any one of SEQ ID NOs:70-78 or 597, or a variant thereof, wherein the endonuclease is configured to be deficient in nuclease activity; and a base editor coupled to the endonuclease.

[0388] In some aspects, the present disclosure provides an engineered nucleic acid editing polypeptide, comprising: an endonuclease configured to bind to a protospacer adjacent motif (PAM) sequence comprising any one of Sequence Numbers: A360-A368 or A598, wherein the endonuclease is a class 2, type II endonuclease, and wherein the endonuclease is configured to be deficient in nuclease activity; and a base editor coupled to the endonuclease.

[0389] In some embodiments, the endonuclease is derived from an uncultivated microorganism. In some embodiments, the endonuclease has less than 80% identity to a Cas9 endonuclease. In some embodiments, the endonuclease further comprises an HNH domain. In some embodiments, the ribonucleic acid sequence configured to bind the endonuclease comprises a sequence with at least 80%, at least 81%, at least 82%, at least 83%, at least 84%, at least 85%, at least 86%, at least 87%, at least 88%, at least 89%, at least 90%, at least 91%, at least 92%, at least 93%, at least 94%, at least 95%, at least 96%, at least 97%, at least 98%, at least 99%, or 100% sequence identity to about 60 to 90 consecutive nucleotides selected from any one of SEQ ID NOs: 88-96, 488-489, or 679-680, or a variant thereof. In some embodiments, the ribonucleic acid sequence configured to bind the endonuclease comprises a sequence with at least 80%, at least 81%, at least 82%, at least 83%, at least 84%, at least 85%, at least 86%, at least 87%, at least 88%, at least 89%, at least 90%, at least 91%, at least 92%, at least 93%, at least 94%, at least 95%, at least 96%, at least 97%, at least 98%, at least 99%, or 100% sequence identity to non-degenerate nucleotides of any one of SEQ ID NOs: 88-96, 488-489, or 679-680, or a variant thereof. In some embodiments, the base editor comprises a sequence with at least 70%, at least 80%, at least 81%, at least 82%, at least 83%, at least 84%, at least 85%, at least 86%, at least 87%, at least 88%, at least 89%, at least 90%, at least 91%, at least 92%, at least 93%, at least 94%, at least 95%, at least 96%, at least 97%, at least 98%, at least 99%, or 100% sequence identity to any one of SEQ ID NOs:70-78 or 597, or a variant thereof. In some embodiments, the base editor is an adenine deaminase. In some embodiments, the adenosine deaminase comprises a sequence with at least 80%, at least 81%, at least 82%, at least 83%, at least 84%, at least 85%, at least 86%, at least 87%, at least 88%, at least 89%, at least 90%, at least 91%, at least 92%, at least 93%, at least 94%, at least 95%, at least 96%, at least 97%, at least 98%, at least 99%, or 100% sequence identity to any one of SEQ ID NOs: 50-51, 57, 385-443, 448-475, or 595, or a variant thereof. In some embodiments, the base editor is a cytosine deaminase. In some embodiments, the cytosine deaminase comprises a sequence with at least 80%, at least 81%, at least 82%, at least 83%, at least 84%, at least 85%, at least 86%, at least 87%, at least 88%, at least 89%, at least 90%, at least 91%, at least 92%, at least 93%, at least 94%, at least 95%, at least 96%, at least 97%, at least 98%, at least 99%, or 100% sequence identity to any one of SEQ ID NOs: 1-49, 444-447, 594, or 58-66, or a variant thereof.

[0390] Systems of the present disclosure may be used for various applications, such as, for example, nucleic acid editing (e.g., gene editing), binding to a nucleic acid molecule (e.g., sequence-specific binding). Such systems may be used, for example, for addressing (e.g., removing or replacing) a genetically inherited mutation that may cause a disease in a subject, inactivating a gene in order to ascertain its function in a cell, as a diagnostic tool to detect disease-causing genetic elements (e.g. via cleavage of reverse-transcribed viral RNA or an amplified DNA sequence encoding a disease-causing mutation), as deactivated enzymes in combination with a probe to target and detect a specific nucleotide sequence (e.g. sequence encoding antibiotic resistance int bacteria), to render viruses inactive or incapable of infecting host cells by targeting viral genomes, to add genes or amend metabolic pathways to engineer organisms to produce valuable small molecules, macromolecules, or secondary metabolites, to establish a gene drive element for evolutionary selection, to detect cell perturbations by foreign small molecules and nucleotides as a biosensor.

TABLE 2
Sequence Listing of Protein and Nucleic Acid Sequences Referred to Herein

| | | | | | | Other |
|---|---|---|---|---|---|---|
| | Sequence | SEQ | | | | Information or |
| Category | Number | ID NO: | Description | Type | Organism | Sequence |
| MG66 | | 1 | MG66-2 deaminase | protein | unknown | uncultivated |
| putative | | | | | | organism |
| cytidine | | | | | | |
| deaminase | | | | | | |
| MG66 | | 2 | MG66-3 deaminase | protein | unknown | uncultivated |
| putative | | | | | | organism |
| cytidine | | | | | | |
| deaminase | | | | | | |
| MG66 | | 3 | MG66-4 deaminase | protein | unknown | uncultivated |
| putative | | | | | | organism |
| cytidine | | | | | | |
| deaminase | | | | | | |
| MG66 | | 4 | MG66-5 deaminase | protein | unknown | uncultivated |
| putative | | | | | | organism |
| cytidine | | | | | | |
| deaminase | | | | | | |
| MG66 | | 5 | MG66-6 deaminase | protein | unknown | uncultivated |
| putative | | | | | | organism |
| cytidine | | | | | | |
| deaminase | | | | | | |
| MG66 | | 6 | MG66-7 deaminase | protein | unknown | uncultivated |
| putative | | | | | | organism |
| cytidine | | | | | | |
| deaminase | | | | | | |
| MG66 | | 7 | MG66-8 deaminase | protein | unknown | uncultivated |
| putative | | | | | | organism |
| cytidine | | | | | | |
| deaminase | | | | | | |
| MG66 | | 8 | MG66-9 deaminase | protein | unknown | uncultivated |
| putative | | | | | | organism |
| cytidine | | | | | | |
| deaminase | | | | | | |
| MG66 | | 9 | MG66-10 deaminase | protein | unknown | uncultivated |
| putative | | | | | | organism |
| cytidine | | | | | | |
| deaminase | | | | | | |
| MG66 | | 10 | MG66-11 deaminase | protein | unknown | uncultivated |
| putative | | | | | | organism |
| cytidine | | | | | | |
| deaminase | | | | | | |
| MG66 | | 11 | MG66-12 deaminase | protein | unknown | uncultivated |
| putative | | | | | | organism |
| cytidine | | | | | | |
| deaminase | | | | | | |
| MG66 | | 12 | MG66-13 deaminase | protein | unknown | uncultivated |
| putative | | | | | | organism |
| cytidine | | | | | | |
| deaminase | | | | | | |
| MG66 | | 13 | MG66-14 deaminase | protein | unknown | uncultivated |
| putative | | | | | | organism |
| cytidine | | | | | | |
| deaminase | | | | | | |
| MG66 | | 14 | MG66-15 deaminase | protein | unknown | uncultivated |
| putative | | | | | | organism |
| cytidine | | | | | | |
| deaminase | | | | | | |
| MG66 | | 15 | MG66-18 deaminase | protein | unknown | uncultivated |
| putative | | | | | | organism |
| cytidine | | | | | | |
| deaminase | | | | | | |
| MG66 | | 16 | MG66-19 deaminase | protein | unknown | uncultivated |
| putative | | | | | | organism |
| cytidine | | | | | | |
| deaminase | | | | | | |
| MG66 | | 17 | MG66-20 deaminase | protein | unknown | uncultivated |
| putative | | | | | | organism |
| cytidine | | | | | | |
| deaminase | | | | | | |
| MG66 | | 18 | MG66-21 deaminase | protein | unknown | uncultivated |
| putative | | | | | | organism |
| cytidine | | | | | | |
| deaminase | | | | | | |
| MG66 | | 19 | MG66-22 deaminase | protein | unknown | uncultivated |
| putative | | | | | | organism |
| cytidine | | | | | | |
| deaminase | | | | | | |
| MG66 | | 20 | MG66-23 deaminase | protein | unknown | uncultivated |
| putative | | | | | | organism |
| cytidine | | | | | | |
| deaminase | | | | | | |
| MG66 | | 21 | MG66-24 deaminase | protein | unknown | uncultivated |
| putative | | | | | | organism |
| cytidine | | | | | | |
| deaminase | | | | | | |
| MG66 | | 22 | MG66-25 deaminase | protein | unknown | uncultivated |
| putative | | | | | | organism |
| cytidine | | | | | | |
| deaminase | | | | | | |
| MG66 | | 23 | MG66-26 deaminase | protein | unknown | uncultivated |
| putative | | | | | | organism |
| cytidine | | | | | | |
| deaminase | | | | | | |
| MG66 | | 24 | MG66-27 deaminase | protein | unknown | uncultivated |
| putative | | | | | | organism |
| cytidine | | | | | | |
| deaminase | | | | | | |
| MG66 | | 25 | MG66-28 deaminase | protein | unknown | uncultivated |
| putative | | | | | | organism |
| cytidine | | | | | | |
| deaminase | | | | | | |
| MG66 | | 26 | MG66-29 deaminase | protein | unknown | uncultivated |
| putative | | | | | | organism |
| cytidine | | | | | | |
| deaminase | | | | | | |
| MG66 | | 27 | MG66-30 deaminase | protein | unknown | uncultivated |
| putative | | | | | | organism |
| cytidine | | | | | | |
| deaminase | | | | | | |
| MG66 | | 28 | MG66-31 deaminase | protein | unknown | uncultivated |
| putative | | | | | | organism |
| cytidine | | | | | | |
| deaminase | | | | | | |
| MG66 | | 29 | MG66-32 deaminase | protein | unknown | uncultivated |
| putative | | | | | | organism |
| cytidine | | | | | | |
| deaminase | | | | | | |
| MG66 | | 30 | MG66-33 deaminase | protein | unknown | uncultivated |
| putative | | | | | | organism |
| cytidine | | | | | | |
| deaminase | | | | | | |
| MG66 | | 31 | MG66-34 deaminase | protein | unknown | uncultivated |
| putative | | | | | | organism |
| cytidine | | | | | | |
| deaminase | | | | | | |
| MG66 | | 32 | MG66-35 deaminase | protein | unknown | uncultivated |
| putative | | | | | | organism |
| cytidine | | | | | | |
| deaminase | | | | | | |
| MG66 | | 33 | MG66-36 deaminase | protein | unknown | uncultivated |
| putative | | | | | | organism |
| cytidine | | | | | | |
| deaminase | | | | | | |
| MG66 | | 34 | MG66-37 deaminase | protein | unknown | uncultivated |
| putative | | | | | | organism |
| cytidine | | | | | | |
| deaminase | | | | | | |
| MG66 | | 35 | MG66-38 deaminase | protein | unknown | uncultivated |
| putative | | | | | | organism |
| cytidine | | | | | | |
| deaminase | | | | | | |
| MG66 | | 36 | MG66-39 deaminase | protein | unknown | uncultivated |
| putative | | | | | | organism |
| cytidine | | | | | | |
| deaminase | | | | | | |
| MG66 | | 37 | MG66-40 deaminase | protein | unknown | uncultivated |
| putative | | | | | | organism |
| cytidine | | | | | | |
| deaminase | | | | | | |
| MG66 | | 38 | MG66-41 deaminase | protein | unknown | uncultivated |
| putative | | | | | | organism |
| cytidine | | | | | | |
| deaminase | | | | | | |
| MG66 | | 39 | MG66-42 deaminase | protein | unknown | uncultivated |
| putative | | | | | | organism |
| cytidine | | | | | | |
| deaminase | | | | | | |
| MG66 | | 40 | MG66-43 deaminase | protein | unknown | uncultivated |
| putative | | | | | | organism |
| cytidine | | | | | | |
| deaminase | | | | | | |
| MG66 | | 41 | MG66-44 deaminase | protein | unknown | uncultivated |
| putative | | | | | | organism |
| cytidine | | | | | | |
| deaminase | | | | | | |
| MG66 | | 42 | MG66-45 deaminase | protein | unknown | uncultivated |
| putative | | | | | | organism |
| cytidine | | | | | | |
| deaminase | | | | | | |
| MG66 | | 43 | MG66-46 deaminase | protein | unknown | uncultivated |
| putative | | | | | | organism |
| cytidine | | | | | | |
| deaminase | | | | | | |
| MG66 | | 44 | MG66-47 deaminase | protein | unknown | uncultivated |
| putative | | | | | | organism |
| cytidine | | | | | | |
| deaminase | | | | | | |
| MG66 | | 45 | MG66-48 deaminase | protein | unknown | uncultivated |
| putative | | | | | | organism |
| cytidine | | | | | | |
| deaminase | | | | | | |
| MG66 | | 46 | MG66-49 deaminase | protein | unknown | uncultivated |
| putative | | | | | | organism |
| cytidine | | | | | | |
| deaminase | | | | | | |
| MG66 | | 47 | MG66-50 deaminase | protein | unknown | uncultivated |
| putative | | | | | | organism |
| cytidine | | | | | | |
| deaminase | | | | | | |
| MG67 | | 48 | MG67-2 deaminase | protein | unknown | uncultivated |
| putative | | | | | | organism |
| cytidine | | | | | | |
| deaminase | | | | | | |
| MG67 | | 49 | MG67-4 deaminase | protein | unknown | uncultivated |
| putative | | | | | | organism |
| cytdidine | | | | | | |
| deaminase | | | | | | |
| MG68 | | 50 | MG68-1 deaminase | protein | unknown | uncultivated |
| putative | | | | | | organism |
| adenosine | | | | | | |
| deaminase | | | | | | |
| (TadA- | | | | | | |
| like) | | | | | | |
| MG68 | | 51 | MG68-2 deaminase | protein | unknown | uncultivated |
| putative | | | | | | organism |
| adenosine | | | | | | |
| deaminase | | | | | | |
| (TadA- | | | | | | |
| like) | | | | | | |
| MG69 | | 52 | MG69-1 deaminase | protein | unknown | uncultivated |
| UGI | | | | | | organism |
| MG69 | | 53 | MG69-2 deaminase | protein | unknown | uncultivated |
| UGI | | | | | | organism |
| MG69 | | 54 | MG69-3 deaminase | protein | unknown | uncultivated |
| UGI | | | | | | organism |
| MG69 | | 55 | MG69-4 deaminase | protein | unknown | uncultivated |
| UGI | | | | | | organism |
| MG69 | | 56 | MG69-5 deaminase | protein | unknown | uncultivated |
| UGI | | | | | | organism |
| reference | | 57 | P68398 TADA tRNA specific | protein | Escherichia | |
| deaminase | | | adenosine deaminase | | coli | |
| | | | | | strain | |
| | | | | | K12 | |
| | | | | | OX | |
| reference | | 58 | P38483 APOBEC 1 C U editing | protein | Rattus | |
| deaminase | | | deaminase | | norvegicus | |
| reference | | 59 | Aicda XM 004869540 cytidine | protein | Heterocephalus | |
| deaminase | | | deaminase | | glaber | |
| reference | | 60 | PmCDA1 L1 AVN88313.1 cytidine | protein | Petromyzo | |
| deaminase | | | deaminase | | marinus | |
| reference | | 61 | PmCDA1 ABO15149.1 cytosine | protein | Petromyzo | |
| deaminase | | | deaminase | | marinus | |
| reference | | 62 | NP 663745.1 DNA dC- dU-editing | protein | Homo | |
| deaminase | | | deaminase APOBEC-3A isoform a | | sapien S | |
| reference | | 63 | Q9GZX7.1 AICDA Single-stranded | protein | Homo | |
| deaminase | | | DNA cytosine deaminase (Activation- | | sapien S | |
| | | | induced cytidine deaminase, Cytidine | | | |
| | | | aminohydrolase) | | | |
| reference | | 64 | LpCDA1L1 3 AVN88320.1 cytidine | protein | Lampetra | |
| deaminase | | | deaminase | | planeri | |
| reference | | 65 | LpCDA1L1 1 AVN88319.1 cytidine | protein | Lampetra | |
| deaminase | | | deaminase | | planeri | |
| reference | | 66 | ljCDA1 cytidine deaminase | nucleotide | Lampetra | |
| deaminase | | | | | planeri | |
| reference | | 67 | P14739 UNGI BPPB2 (UGI) | protein | Bacillus | |
| UGI | | | | | phage | |
| | | | | | PBS2 | |
| adenine | | 68 | linker-His tag-adenine deaminse- | protein | artificial | |
| base | | | linker-nickase-linker-SV40 NLS | | sequence | |
| editor | | | | | | |
| cytosine | | 69 | linker-His tag-cytidine deaminase- | protein | artificial | |
| base | | | linker-nickase-linker-uracil glycosylase | | sequence | |
| editor | | | inhibitor-linker-SV40 NLS | | | |
| nickase | | 70 | nMG1-4 (D9A) nickase | protein | artificial | |
| | | | | | sequence | |
| nickase | | 71 | nMG1-6 (D13A) nickase | protein | artificial | |
| | | | | | sequence | |
| nickase | | 72 | nMG3-6 (D13A) nickase | protein | artificial | |
| | | | | | sequence | |
| nickase | | 73 | nMG3-7 (D12A) nickase | protein | artificial | |
| | | | | | sequence | |
| nickase | | 74 | nMG3-8 (D13A) nickase | protein | artificial | |
| | | | | | sequence | |
| nickase | | 75 | nMG4-5 (D17A) nickase | protein | artificial | |
| | | | | | sequence | |
| nickase | | 76 | nMG14-1 (D23A) nickase | protein | artificial | |
| | | | | | sequence | |
| nickase | | 77 | nMG15-1 (D8A) nickase | protein | artificial | |
| | | | | | sequence | |
| nickase | | 78 | nMG18-1 (D12A) nickase | protein | artificial | |
| | | | | | sequence | |
| target | | 79 | nMG1-4 (D9A) protospacer and PAM | nucleotide | artificial | |
| sequence | | | for in vitro nickase assay | | sequence | |
| target | | 80 | nMG1-6 (D13A) protospacer and PAM | nucleotide | artificial | |
| sequence | | | for in vitro nickase assay | | sequence | |
| target | | 81 | nMG3-6 (D13A) protospacer and PAM | nucleotide | artificial | |
| sequence | | | for in vitro nickase assay | | sequence | |
| target | | 82 | nMG3-7 (D12A) protospacer and PAM | nucleotide | artificial | |
| sequence | | | for in vitro nickase assay | | sequence | |
| target | | 83 | nMG3-8 (D13A) protospacer and PAM | nucleotide | artificial | |
| sequence | | | for in vitro nickase assay | | sequence | |
| target | | 84 | nMG4-5 (D17A) protospacer and PAM | nucleotide | artificial | |
| sequence | | | for in vitro nickase assay | | sequence | |
| target | | 85 | nMG14-1 (D23A) protospacer and | nucleotide | artificial | |
| sequence | | | PAM for in vitro nickase assay | | sequence | |
| target | | 86 | nMG15-1 (D8A) protospacer and PAM | nucleotide | artificial | |
| sequence | | | for in vitro nickase assay | | sequence | |
| target | | 87 | nMG18-1 (D12A) protospacer and | nucleotide | artificial | |
| sequence | | | PAM for in vitro nickase assay | | sequence | |
| single | | 88 | nMG1-4 (D9A) single guide RNA for | nucleotide | artificial | |
| guide | | | in vitro nickase assay | | sequence | |
| RNA | | | | | | |
| single | | 89 | nMG1-6 (D13A) single guide RNA for | nucleotide | artificial | |
| guide | | | in vitro nickase assay | | sequence | |
| RNA | | | | | | |
| single | | 90 | nMG3-6 (D13A) single guide RNA for | nucleotide | artificial | |
| guide | | | in vitro nickase assay | | sequence | |
| RNA | | | | | | |
| single | | 91 | nMG3-7 (D12A) single guide RNA for | nucleotide | artificial | |
| guide | | | in vitro nickase assay | | sequence | |
| RNA | | | | | | |
| single | | 92 | nMG3-8 (D13A) single guide RNA for | nucleotide | artificial | |
| guide | | | in vitro nickase assay | | sequence | |
| RNA | | | | | | |
| single | | 93 | nMG4-5 (D17A) single guide RNA for | nucleotide | artificial | |
| guide | | | in vitro nickase assay | | sequence | |
| RNA | | | | | | |
| single | | 94 | nMG14-1 (D23A) single guide RNA | nucleotide | artificial | |
| guide | | | for in vitro nickase assay | | sequence | |
| RNA | | | | | | |
| single | | 95 | nMG15-1 (D8A) single guide RNA for | nucleotide | artificial | |
| guide | | | in vitro nickase assay | | sequence | |
| RNA | | | | | | |
| single | | 96 | nMG18-1 (D12A) single guide RNA | nucleotide | artificial | |
| guide | | | for in vitro nickase assay | | sequence | |
| RNA | | | | | | |
| spacer | | 97 | MGA1-4 sgRNA spacer 1 (targeting E. | nucleotide | artificial | |
| | | | coli lacZ) | | sequence | |
| spacer | | 98 | MGA1-4 sgRNA spacer 2 (targeting E. | nucleotide | artificial | |
| | | | coli lacZ) | | sequence | |
| spacer | | 99 | MGA1-4 sgRNA spacer 3 (targeting E. | nucleotide | artificial | |
| | | | coli lacZ) | | sequence | |
| spacer | | 100 | MGA1-6 sgRNA spacer 1 (targeting E. | nucleotide | artificial | |
| | | | coli lacZ) | | sequence | |
| spacer | | 101 | MGA1-6 sgRNA spacer 2 (targeting E. | nucleotide | artificial | |
| | | | coli lacZ) | | sequence | |
| spacer | | 102 | MGA1-6 sgRNA spacer 3 (targeting E. | nucleotide | artificial | |
| | | | coli lacZ) | | sequence | |
| spacer | | 103 | MGA3-6 sgRNA spacer 1 (targeting E. | nucleotide | artificial | |
| | | | coli lacZ) | | sequence | |
| spacer | | 104 | MGA3-6 sgRNA spacer 2 (targeting E. | nucleotide | artificial | |
| | | | coli lacZ) | | sequence | |
| spacer | | 105 | MGA3-6 sgRNA spacer 3 (targeting E. | nucleotide | artificial | |
| | | | coli lacZ) | | sequence | |
| spacer | | 106 | MGA3-7 sgRNA spacer 1 (targeting E. | nucleotide | artificial | |
| | | | coli lacZ) | | sequence | |
| spacer | | 107 | MGA3-7 sgRNA spacer 2 (targeting E. | nucleotide | artificial | |
| | | | coli lacZ) | | sequence | |
| spacer | | 108 | MGA3-7 sgRNA spacer 3 (targeting E. | nucleotide | artificial | |
| | | | coli lacZ) | | sequence | |
| spacer | | 109 | MGA3-8 sgRNA spacer 1 (targeting E. | nucleotide | artificial | |
| | | | coli lacZ) | | sequence | |
| spacer | | 110 | MGA3-8 sgRNA spacer 2 (targeting E. | nucleotide | artificial | |
| | | | coli lacZ) | | sequence | |
| spacer | | 111 | MGA3-8 sgRNA spacer 3 (targeting E. | nucleotide | artificial | |
| | | | coli lacZ) | | sequence | |
| spacer | | 112 | MGA4-5 sgRNA spacer 1 (targeting E. | nucleotide | artificial | |
| | | | coli lacZ) | | sequence | |
| spacer | | 113 | MGA4-5 sgRNA spacer 2 (targeting E. | nucleotide | artificial | |
| | | | coli lacZ) | | sequence | |
| spacer | | 114 | MGA4-5 sgRNA spacer 3 (targeting E. | nucleotide | artificial | |
| | | | coli lacZ) | | sequence | |
| spacer | | 115 | MGA14-1 sgRNA spacer 1 (targeting | nucleotide | artificial | |
| | | | E. coli lacZ) | | sequence | |
| spacer | | 116 | MGA14-1 sgRNA spacer 2 (targeting | nucleotide | artificial | |
| | | | E. coli lacZ) | | sequence | |
| spacer | | 117 | MGA14-1 sgRNA spacer 3 (targeting | nucleotide | artificial | |
| | | | E. coli lacZ) | | sequence | |
| spacer | | 118 | MGA15-1 sgRNA spacer 1 (targeting | nucleotide | artificial | |
| | | | E. coli lacZ) | | sequence | |
| spacer | | 119 | MGA15-1 sgRNA spacer 2 (targeting | nucleotide | artificial | |
| | | | E. coli lacZ) | | sequence | |
| spacer | | 120 | MGA15-1 sgRNA spacer 3 (targeting | nucleotide | artificial | |
| | | | E. coli lacZ) | | sequence | |
| spacer | | 121 | MGA18-1 sgRNA spacer 1 (targeting | nucleotide | artificial | |
| | | | E. coli lacZ) | | sequence | |
| spacer | | 122 | MGA18-1 sgRNA spacer 2 (targeting | nucleotide | artificial | |
| | | | E. coli lacZ) | | sequence | |
| spacer | | 123 | MGA18-1 sgRNA spacer 3 (targeting | nucleotide | artificial | |
| | | | E. coli lacZ) | | sequence | |
| spacer | | 124 | ABE8.17m sgRNA spacer 1 (targeting | nucleotide | artificial | |
| | | | E. coli lacZ) | | sequence | |
| spacer | | 125 | ABE8.17m sgRNA spacer 2 (targeting | nucleotide | artificial | |
| | | | E. coli lacZ) | | sequence | |
| spacer | | 126 | ABE8.17m sgRNA spacer 3 (targeting | nucleotide | artificial | |
| | | | E. coli lacZ) | | sequence | |
| spacer | | 127 | MGC1-4 sgRNA spacer 1 (targeting E. | nucleotide | artificial | |
| | | | coli lacZ) | | sequence | |
| spacer | | 128 | MGC1-4 sgRNA spacer 2 (targeting E. | nucleotide | artificial | |
| | | | coli lacZ) | | sequence | |
| spacer | | 129 | MGC1-4 sgRNA spacer 3 (targeting E. | nucleotide | artificial | |
| | | | coli lacZ) | | sequence | |
| spacer | | 130 | MGC1-6 sgRNA spacer 1 (targeting E. | nucleotide | artificial | |
| | | | coli lacZ) | | sequence | |
| spacer | | 131 | MGC1-6 sgRNA spacer 2 (targeting E. | nucleotide | artificial | |
| | | | coli lacZ) | | sequence | |
| spacer | | 132 | MGC1-6 sgRNA spacer 3 (targeting E. | nucleotide | artificial | |
| | | | coli lacZ) | | sequence | |
| spacer | | 133 | MGC3-6 sgRNA spacer 1 (targeting E. | nucleotide | artificial | |
| | | | coli lacZ) | | sequence | |
| spacer | | 134 | MGC3-6 sgRNA spacer 2 (targeting E. | nucleotide | artificial | |
| | | | coli lacZ) | | sequence | |
| spacer | | 135 | MGC3-6 sgRNA spacer 3 (targeting E. | nucleotide | artificial | |
| | | | coli lacZ) | | sequence | |
| spacer | | 136 | MGC3-7 sgRNA spacer 1 (targeting E. | nucleotide | artificial | |
| | | | coli lacZ) | | sequence | |
| spacer | | 137 | MGC3-7 sgRNA spacer 2 (targeting E. | nucleotide | artificial | |
| | | | coli lacZ) | | sequence | |
| spacer | | 138 | MGC3-7 sgRNA spacer 3 (targeting E. | nucleotide | artificial | |
| | | | coli lacZ) | | sequence | |
| spacer | | 139 | MGC3-8 sgRNA spacer 1 (targeting E. | nucleotide | artificial | |
| | | | coli lacZ) | | sequence | |
| spacer | | 140 | MGC3-8 sgRNA spacer 2 (targeting E. | nucleotide | artificial | |
| | | | coli lacZ) | | sequence | |
| spacer | | 141 | MGC3-8 sgRNA spacer 3 (targeting E. | nucleotide | artificial | |
| | | | coli lacZ) | | sequence | |
| spacer | | 142 | MGC4-5 sgRNA spacer 1 (targeting E. | nucleotide | artificial | |
| | | | coli lacZ) | | sequence | |
| spacer | | 143 | MGC4-5 sgRNA spacer 2 (targeting E. | nucleotide | artificial | |
| | | | coli lacZ) | | sequence | |
| spacer | | 144 | MGC4-5 sgRNA spacer 3 (targeting E. | nucleotide | artificial | |
| | | | coli lacZ) | | sequence | |
| spacer | | 145 | MGC14-1 sgRNA spacer 1 (targeting | nucleotide | artificial | |
| | | | E. coli lacZ) | | sequence | |
| spacer | | 146 | MGC14-1 sgRNA spacer 2 (targeting | nucleotide | artificial | |
| | | | E. coli lacZ) | | sequence | |
| spacer | | 147 | MGC14-1 sgRNA spacer 3 (targeting | nucleotide | artificial | |
| | | | E. coli lacZ) | | sequence | |
| spacer | | 148 | MGC15-1 sgRNA spacer 1 (targeting | nucleotide | artificial | |
| | | | E. coli lacZ) | | sequence | |
| spacer | | 149 | MGC15-1 sgRNA spacer 2 (targeting | nucleotide | artificial | |
| | | | E. coli lacZ) | | sequence | |
| spacer | | 150 | MGC15-1 sgRNA spacer 3 (targeting | nucleotide | artificial | |
| | | | E. coli lacZ) | | sequence | |
| spacer | | 151 | MGC18-1 sgRNA spacer 1 (targeting | nucleotide | artificial | |
| | | | E. coli lacZ) | | sequence | |
| spacer | | 152 | MGC18-1 sgRNA spacer 2 (targeting | nucleotide | artificial | |
| | | | E. coli lacZ) | | sequence | |
| spacer | | 153 | MGC18-1 sgRNA spacer 3 (targeting | nucleotide | artificial | |
| | | | E. coli lacZ) | | sequence | |
| spacer | | 154 | BE3 sgRNA spacer 1 (targeting E. coli | nucleotide | artificial | |
| | | | lacZ) | | sequence | |
| spacer | | 155 | BE3 sgRNA spacer 2 (targeting E. coli | nucleotide | artificial | |
| | | | lacZ) | | sequence | |
| spacer | | 156 | BE3 sgRNA spacer 3 (targeting E. coli | nucleotide | artificial | |
| | | | lacZ) | | sequence | |
| primer | | 157 | Site-directed mutagenesis of MG1-4 | nucleotide | artificial | |
| | | | (D9A) | | sequence | |
| primer | | 158 | Site-directed mutagenesis of MG1-4 | nucleotide | artificial | |
| | | | (D9A) | | sequence | |
| primer | | 159 | Site-directed mutagenesis of MG1-6 | nucleotide | artificial | |
| | | | (D13A) | | sequence | |
| primer | | 160 | Site-directed mutagenesis of MG1-6 | nucleotide | artificial | |
| | | | (D13A) | | sequence | |
| primer | | 161 | Site-directed mutagenesis of MG3-6 | nucleotide | artificial | |
| | | | (D13A) | | sequence | |
| primer | | 162 | Site-directed mutagenesis of MG3-6 | nucleotide | artificial | |
| | | | (D13A) | | sequence | |
| primer | | 163 | Site-directed mutagenesis of MG3-7 | nucleotide | artificial | |
| | | | (D12A) | | sequence | |
| primer | | 164 | Site-directed mutagenesis of MG3-7 | nucleotide | artificial | |
| | | | (D12A) | | sequence | |
| primer | | 165 | Site-directed mutagenesis of MG3-8 | nucleotide | artificial | |
| | | | (D13A) | | sequence | |
| primer | | 166 | Site-directed mutagenesis of MG3-8 | nucleotide | artificial | |
| | | | (D13A) | | sequence | |
| primer | | 167 | Site-directed mutagenesis of MG4-5 | nucleotide | artificial | |
| | | | (D17A) | | sequence | |
| primer | | 168 | Site-directed mutagenesis of MG4-5 | nucleotide | artificial | |
| | | | (D17A) | | sequence | |
| primer | | 169 | Site-directed mutagenesis of MG14-1 | nucleotide | artificial | |
| | | | (D23A) | | sequence | |
| primer | | 170 | Site-directed mutagenesis of MG14-1 | nucleotide | artificial | |
| | | | (D23A) | | sequence | |
| primer | | 171 | Site-directed mutagenesis of MG15-1 | nucleotide | artificial | |
| | | | (D8A) | | sequence | |
| primer | | 172 | Site-directed mutagenesis of MG15-1 | nucleotide | artificial | |
| | | | (D8A) | | sequence | |
| primer | | 173 | Site-directed mutagenesis of MG18-1 | nucleotide | artificial | |
| | | | (D12A) | | sequence | |
| primer | | 174 | Site-directed mutagenesis of MG18-1 | nucleotide | artificial | |
| | | | (D12A) | | sequence | |
| primer | | 175 | Site-directed mutagenesis of SpCas9 | nucleotide | artificial | |
| | | | (D10A) | | sequence | |
| primer | | 176 | Site-directed mutagenesis of SpCas9 | nucleotide | artificial | |
| | | | (D10A) | | sequence | |
| primer | | 177 | For lacZ sequencing | nucleotide | artificial | |
| | | | | | sequence | |
| primer | | 178 | For lacZ sequencing | nucleotide | artificial | |
| | | | | | sequence | |
| primer | | 179 | Amplify the fragment for nickase assay | nucleotide | artificial | |
| | | | | | sequence | |
| primer | | 180 | Amplify the fragment for nickase assay | nucleotide | artificial | |
| | | | | | sequence | |
| primer | | 181 | Amplify T7 promoter-His tag-adenine | nucleotide | artificial | |
| | | | deaminase for MGA entry plasmid | | sequence | |
| primer | | 182 | Amplify T7 promoter-His tag-adenine | nucleotide | artificial | |
| | | | deaminase for MGA entry plasmid | | sequence | |
| primer | | 183 | Amplify SV40 NLS-vector backbone | nucleotide | artificial | |
| | | | for MGA entry plasmid | | sequence | |
| primer | | 184 | Amplify SV40 NLS-vector backbone | nucleotide | artificial | |
| | | | for MGA entry plasmid | | sequence | |
| primer | | 185 | Amplify vector backbone for MGA | nucleotide | artificial | |
| | | | entry plasmid | | sequence | |
| primer | | 186 | Amplify vector backbone for MGA | nucleotide | artificial | |
| | | | entry plasmid | | sequence | |
| primer | | 187 | Amplify T7 promoter-His-tag-cytosine | nucleotide | artificial | |
| | | | deaminase for MGC entry plasmid | | sequence | |
| primer | | 188 | Amplify T7 promoter-His-tag-cytosine | nucleotide | artificial | |
| | | | deaminase for MGC entry plasmid | | sequence | |
| primer | | 189 | Amplify UGI-SV40 NLS for MGC | nucleotide | artificial | |
| | | | entry plasmid | | sequence | |
| primer | | 190 | Amplify UGI-SV40 NLS for MGC | nucleotide | artificial | |
| | | | entry plasmid | | sequence | |
| primer | | 191 | Amplify SV40 NLS-vector backbone | nucleotide | artificial | |
| | | | for MGC entry plasmid | | sequence | |
| primer | | 192 | Amplify SV40 NLS-vector backbone | nucleotide | artificial | |
| | | | for MGC entry plasmid | | sequence | |
| primer | | 193 | Amplify vector backbone for MGC | nucleotide | artificial | |
| | | | entry plasmid | | sequence | |
| primer | | 194 | Amplify vector backbone for MGC | nucleotide | artificial | |
| | | | entry plasmid | | sequence | |
| primer | | 195 | Amplify nMG1-4 (D9A) for pMGA | nucleotide | artificial | |
| | | | expression plasmid | | sequence | |
| primer | | 196 | Amplify nMG1-4 (D9A) for pMGA | nucleotide | artificial | |
| | | | expression plasmid | | sequence | |
| primer | | 197 | Amplify nMG1-6 (D13A) for pMGA | nucleotide | artificial | |
| | | | expression plasmid | | sequence | |
| primer | | 198 | Amplify nMG1-6 (D13A) for pMGA | nucleotide | artificial | |
| | | | expression plasmid | | sequence | |
| primer | | 199 | Amplify nMG3-6 (D13A) for pMGA | nucleotide | artificial | |
| | | | expression plasmid | | sequence | |
| primer | | 200 | Amplify nMG3-6 (D13A) for pMGA | nucleotide | artificial | |
| | | | expression plasmid | | sequence | |
| primer | | 201 | Amplify nMG3-7 (D12A) for pMGA | nucleotide | artificial | |
| | | | expression plasmid | | sequence | |
| primer | | 202 | Amplify nMG3-7 (D12A) for pMGA | nucleotide | artificial | |
| | | | expression plasmid | | sequence | |
| primer | | 203 | Amplify nMG3-8 (D13A) for pMGA | nucleotide | artificial | |
| | | | expression plasmid | | sequence | |
| primer | | 204 | Amplify nMG3-8 (D13A) for pMGA | nucleotide | artificial | |
| | | | expression plasmid | | sequence | |
| primer | | 205 | Amplify nMG4-5 (D17A) for pMGA | nucleotide | artificial | |
| | | | expression plasmid | | sequence | |
| primer | | 206 | Amplify nMG4-5 (D17A) for pMGA | nucleotide | artificial | |
| | | | expression plasmid | | sequence | |
| primer | | 207 | Amplify nMG14-1 (D23A) for pMGA | nucleotide | artificial | |
| | | | expression plasmid | | sequence | |
| primer | | 208 | Amplify nMG14-1 (D23A) for pMGA | nucleotide | artificial | |
| | | | expression plasmid | | sequence | |
| primer | | 209 | Amplify nMG15-1 (D8A) for pMGA | nucleotide | artificial | |
| | | | expression plasmid | | sequence | |
| primer | | 210 | Amplify nMG15-1 (D8A) for pMGA | nucleotide | artificial | |
| | | | expression plasmid | | sequence | |
| primer | | 211 | Amplify nMG18-1 (D12A) for pMGA | nucleotide | artificial | |
| | | | expression plasmid | | sequence | |
| primer | | 212 | Amplify nMG18-1 (D12A) for pMGA | nucleotide | artificial | |
| | | | expression plasmid | | sequence | |
| primer | | 213 | Amplify SpCas9 (D10A) for pMGA | nucleotide | artificial | |
| | | | expression plasmid | | sequence | |
| primer | | 214 | Amplify SpCas9 (D10A) for pMGA | nucleotide | artificial | |
| | | | expression plasmid | | sequence | |
| primer | | 215 | Amplify nMG1-4 (D9A) for pMGC | nucleotide | artificial | |
| | | | expression plasmid | | sequence | |
| primer | | 216 | Amplify nMG1-4 (D9A) for pMGC | nucleotide | artificial | |
| | | | expression plasmid | | sequence | |
| primer | | 217 | Amplify nMG1-6 (D13A) for pMGC | nucleotide | artificial | |
| | | | expression plasmid | | sequence | |
| primer | | 218 | Amplify nMG1-6 (D13A) for pMGC | nucleotide | artificial | |
| | | | expression plasmid | | sequence | |
| primer | | 219 | Amplify nMG3-6 (D13A) for pMGC | nucleotide | artificial | |
| | | | expression plasmid | | sequence | |
| primer | | 220 | Amplify nMG3-6 (D13A) for pMGC | nucleotide | artificial | |
| | | | expression plasmid | | sequence | |
| primer | | 221 | Amplify nMG3-7 (D12A) for pMGC | nucleotide | artificial | |
| | | | expression plasmid | | sequence | |
| primer | | 222 | Amplify nMG3-7 (D12A) for pMGC | nucleotide | artificial | |
| | | | expression plasmid | | sequence | |
| primer | | 223 | Amplify nMG3-8 (D13A) for pMGC | nucleotide | artificial | |
| | | | expression plasmid | | sequence | |
| primer | | 224 | Amplify nMG3-8 (D13A) for pMGC | nucleotide | artificial | |
| | | | expression plasmid | | sequence | |
| primer | | 225 | Amplify nMG4-5 (D17A) for pMGC | nucleotide | artificial | |
| | | | expression plasmid | | sequence | |
| primer | | 226 | Amplify nMG4-5 (D17A) for pMGC | nucleotide | artificial | |
| | | | expression plasmid | | sequence | |
| primer | | 227 | Amplify nMG14-1 (D23A) for pMGC | nucleotide | artificial | |
| | | | expression plasmid | | sequence | |
| primer | | 228 | Amplify nMG14-1 (D23A) for pMGC | nucleotide | artificial | |
| | | | expression plasmid | | sequence | |
| primer | | 229 | Amplify nMG15-1 (D8A) for pMGC | nucleotide | artificial | |
| | | | expression plasmid | | sequence | |
| primer | | 230 | Amplify nMG15-1 (D8A) for pMGC | nucleotide | artificial | |
| | | | expression plasmid | | sequence | |
| primer | | 231 | Amplify nMG18-1 (D12A) for pMGC | nucleotide | artificial | |
| | | | expression plasmid | | sequence | |
| primer | | 232 | Amplify nMG18-1 (D12A) for pMGC | nucleotide | artificial | |
| | | | expression plasmid | | sequence | |
| primer | | 233 | Amplify SpCas9 (D10A) for pMGC | nucleotide | artificial | |
| | | | expression plasmid | | sequence | |
| primer | | 234 | Amplify SpCas9 (D10A) for pMGC | nucleotide | artificial | |
| | | | expression plasmid | | sequence | |
| primer | | 235 | Amplify MGA1-4_sgRNA spacer 1 | nucleotide | artificial | |
| | | | | | sequence | |
| primer | | 236 | Amplify MGA1-4_sgRNA spacer 1 | nucleotide | artificial | |
| | | | | | sequence | |
| primer | | 237 | Amplify MGA1-4_sgRNA spacer 2 | nucleotide | artificial | |
| | | | | | sequence | |
| primer | | 238 | Amplify MGA1-4_sgRNA spacer 2 | nucleotide | artificial | |
| | | | | | sequence | |
| primer | | 239 | Amplify MGA1-4_sgRNA spacer 3 | nucleotide | artificial | |
| | | | | | sequence | |
| primer | | 240 | Amplify MGA1-4_sgRNA spacer 3 | nucleotide | artificial | |
| | | | | | sequence | |
| primer | | 241 | Amplify MGA1-6_sgRNA spacer 1 | nucleotide | artificial | |
| | | | | | sequence | |
| primer | | 242 | Amplify MGA1-6_sgRNA spacer 1 | nucleotide | artificial | |
| | | | | | sequence | |
| primer | | 243 | Amplify MGA1-6_sgRNA spacer 2 | nucleotide | artificial | |
| | | | | | sequence | |
| primer | | 244 | Amplify MGA1-6_sgRNA spacer 2 | nucleotide | artificial | |
| | | | | | sequence | |
| primer | | 245 | Amplify MGA1-6_sgRNA spacer 3 | nucleotide | artificial | |
| | | | | | sequence | |
| primer | | 246 | Amplify MGA1-6_sgRNA spacer 3 | nucleotide | artificial | |
| | | | | | sequence | |
| primer | | 247 | Amplify MGA3-6_sgRNA spacer 1 | nucleotide | artificial | |
| | | | | | sequence | |
| primer | | 248 | Amplify MGA3-6_sgRNA spacer 1 | nucleotide | artificial | |
| | | | | | sequence | |
| primer | | 249 | Amplify MGA3-6_sgRNA spacer 2 | nucleotide | artificial | |
| | | | | | sequence | |
| primer | | 250 | Amplify MGA3-6_sgRNA spacer 2 | nucleotide | artificial | |
| | | | | | sequence | |
| primer | | 251 | Amplify MGA3-6_sgRNA spacer 3 | nucleotide | artificial | |
| | | | | | sequence | |
| primer | | 252 | Amplify MGA3-6_sgRNA spacer 3 | nucleotide | artificial | |
| | | | | | sequence | |
| primer | | 253 | Amplify MGA3-7_sgRNA spacer 1 | nucleotide | artificial | |
| | | | | | sequence | |
| primer | | 254 | Amplify MGA3-7_sgRNA spacer 1 | nucleotide | artificial | |
| | | | | | sequence | |
| primer | | 255 | Amplify MGA3-7_sgRNA spacer 2 | nucleotide | artificial | |
| | | | | | sequence | |
| primer | | 256 | Amplify MGA3-7_sgRNA spacer 2 | nucleotide | artificial | |
| | | | | | sequence | |
| primer | | 257 | Amplify MGA3-7_sgRNA spacer 3 | nucleotide | artificial | |
| | | | | | sequence | |
| primer | | 258 | Amplify MGA3-7_sgRNA spacer 3 | nucleotide | artificial | |
| | | | | | sequence | |
| primer | | 259 | Amplify MGA4-5_sgRNA spacer 1 | nucleotide | artificial | |
| | | | | | sequence | |
| primer | | 260 | Amplify MGA4-5_sgRNA spacer 1 | nucleotide | artificial | |
| | | | | | sequence | |
| primer | | 261 | Amplify MGA4-5_sgRNA spacer 2 | nucleotide | artificial | |
| | | | | | sequence | |
| primer | | 262 | Amplify MGA4-5_sgRNA spacer 2 | nucleotide | artificial | |
| | | | | | sequence | |
| primer | | 263 | Amplify MGA4-5_sgRNA spacer 3 | nucleotide | artificial | |
| | | | | | sequence | |
| primer | | 264 | Amplify MGA4-5_sgRNA spacer 3 | nucleotide | artificial | |
| | | | | | sequence | |
| primer | | 265 | Amplify MGA14-1_sgRNA spacer 1 | nucleotide | artificial | |
| | | | | | sequence | |
| primer | | 266 | Amplify MGA14-1_sgRNA spacer 1 | nucleotide | artificial | |
| | | | | | sequence | |
| primer | | 267 | Amplify MGA14-1_sgRNA spacer 2 | nucleotide | artificial | |
| | | | | | sequence | |
| primer | | 268 | Amplify MGA14-1_sgRNA spacer 2 | nucleotide | artificial | |
| | | | | | sequence | |
| primer | | 269 | Amplify MGA14-1_sgRNA spacer 3 | nucleotide | artificial | |
| | | | | | sequence | |
| primer | | 270 | Amplify MGA14-1_sgRNA spacer 3 | nucleotide | artificial | |
| | | | | | sequence | |
| primer | | 271 | Amplify MGA15-1_sgRNA spacer 1 | nucleotide | artificial | |
| | | | | | sequence | |
| primer | | 272 | Amplify MGA15-1_sgRNA spacer 1 | nucleotide | artificial | |
| | | | | | sequence | |
| primer | | 273 | Amplify MGA15-1_sgRNA spacer 2 | nucleotide | artificial | |
| | | | | | sequence | |
| primer | | 274 | Amplify MGA15-1_sgRNA spacer 2 | nucleotide | artificial | |
| | | | | | sequence | |
| primer | | 275 | Amplify MGA15-1_sgRNA spacer 3 | nucleotide | artificial | |
| | | | | | sequence | |
| primer | | 276 | Amplify MGA15-1_sgRNA spacer 3 | nucleotide | artificial | |
| | | | | | sequence | |
| primer | | 277 | Amplify MGA18-1_sgRNA spacer 1 | nucleotide | artificial | |
| | | | | | sequence | |
| primer | | 278 | Amplify MGA18-1_sgRNA spacer 1 | nucleotide | artificial | |
| | | | | | sequence | |
| primer | | 279 | Amplify MGA18-1_sgRNA spacer 2 | nucleotide | artificial | |
| | | | | | sequence | |
| primer | | 280 | Amplify MGA18-1_sgRNA spacer 2 | nucleotide | artificial | |
| | | | | | sequence | |
| primer | | 281 | Amplify MGA18-1_sgRNA spacer 3 | nucleotide | artificial | |
| | | | | | sequence | |
| primer | | 282 | Amplify MGA18-1_sgRNA spacer 3 | nucleotide | artificial | |
| | | | | | sequence | |
| primer | | 283 | Amplify ABE8.17m_sgRNA spacer 1 | nucleotide | artificial | |
| | | | | | sequence | |
| primer | | 284 | Amplify ABE8.17m_sgRNA spacer 1 | nucleotide | artificial | |
| | | | | | sequence | |
| primer | | 285 | Amplify ABE8.17m_sgRNA spacer 2 | nucleotide | artificial | |
| | | | | | sequence | |
| primer | | 286 | Amplify ABE8.17m_sgRNA spacer 2 | nucleotide | artificial | |
| | | | | | sequence | |
| primer | | 287 | Amplify ABE8.17m_sgRNA spacer 3 | nucleotide | artificial | |
| | | | | | sequence | |
| primer | | 288 | Amplify ABE8.17m_sgRNA spacer 3 | nucleotide | artificial | |
| | | | | | sequence | |
| primer | | 289 | Amplify MGC1-4_spacer 1 | nucleotide | artificial | |
| | | | | | sequence | |
| primer | | 290 | Amplify MGC1-4_spacer 1 | nucleotide | artificial | |
| | | | | | sequence | |
| primer | | 291 | Amplify MGC1-4_spacer 2 | nucleotide | artificial | |
| | | | | | sequence | |
| primer | | 292 | Amplify MGC1-4_spacer 2 | nucleotide | artificial | |
| | | | | | sequence | |
| primer | | 293 | Amplify MGC1-4_spacer 3 | nucleotide | artificial | |
| | | | | | sequence | |
| primer | | 294 | Amplify MGC1-4_spacer 3 | nucleotide | artificial | |
| | | | | | sequence | |
| primer | | 295 | Amplify MGC1-6_spacer 1 | nucleotide | artificial | |
| | | | | | sequence | |
| primer | | 296 | Amplify MGC1-6_spacer 1 | nucleotide | artificial | |
| | | | | | sequence | |
| primer | | 297 | Amplify MGC1-6_spacer 2 | nucleotide | artificial | |
| | | | | | sequence | |
| primer | | 298 | Amplify MGC1-6_spacer 2 | nucleotide | artificial | |
| | | | | | sequence | |
| primer | | 299 | Amplify MGC1-6_spacer 3 | nucleotide | artificial | |
| | | | | | sequence | |
| primer | | 300 | Amplify MGC1-6_spacer 3 | nucleotide | artificial | |
| | | | | | sequence | |
| primer | | 301 | Amplify MGC3-6_spacer 1 | nucleotide | artificial | |
| | | | | | sequence | |
| primer | | 302 | Amplify MGC3-6_spacer 1 | nucleotide | artificial | |
| | | | | | sequence | |
| primer | | 303 | Amplify MGC3-6_spacer 2 | nucleotide | artificial | |
| | | | | | sequence | |
| primer | | 304 | Amplify MGC3-6_spacer 2 | nucleotide | artificial | |
| | | | | | sequence | |
| primer | | 305 | Amplify MGC3-6_spacer 3 | nucleotide | artificial | |
| | | | | | sequence | |
| primer | | 306 | Amplify MGC3-6_spacer 3 | nucleotide | artificial | |
| | | | | | sequence | |
| primer | | 307 | Amplify MGC3-7_spacer 1 | nucleotide | artificial | |
| | | | | | sequence | |
| primer | | 308 | Amplify MGC3-7_spacer 1 | nucleotide | artificial | |
| | | | | | sequence | |
| primer | | 309 | Amplify MGC3-7_spacer 2 | nucleotide | artificial | |
| | | | | | sequence | |
| primer | | 310 | Amplify MGC3-7_spacer 2 | nucleotide | artificial | |
| | | | | | sequence | |
| primer | | 311 | Amplify MGC3-7_spacer 3 | nucleotide | artificial | |
| | | | | | sequence | |
| primer | | 312 | Amplify MGC3-7_spacer 3 | nucleotide | artificial | |
| | | | | | sequence | |
| primer | | 313 | Amplify MGC4-5_spacer 1 | nucleotide | artificial | |
| | | | | | sequence | |
| primer | | 314 | Amplify MGC4-5_spacer 1 | nucleotide | artificial | |
| | | | | | sequence | |
| primer | | 315 | Amplify MGC4-5_spacer 2 | nucleotide | artificial | |
| | | | | | sequence | |
| primer | | 316 | Amplify MGC4-5_spacer 2 | nucleotide | artificial | |
| | | | | | sequence | |
| primer | | 317 | Amplify MGC4-5_spacer 3 | nucleotide | artificial | |
| | | | | | sequence | |
| primer | | 318 | Amplify MGC4-5_spacer 3 | nucleotide | artificial | |
| | | | | | sequence | |
| primer | | 319 | Amplify MGC14-1_spacer 1 | nucleotide | artificial | |
| | | | | | sequence | |
| primer | | 320 | Amplify MGC14-1_spacer 1 | nucleotide | artificial | |
| | | | | | sequence | |
| primer | | 321 | Amplify MGC14-1_spacer 2 | nucleotide | artificial | |
| | | | | | sequence | |
| primer | | 322 | Amplify MGC14-1_spacer 2 | nucleotide | artificial | |
| | | | | | sequence | |
| primer | | 323 | Amplify MGC14-1_spacer 3 | nucleotide | artificial | |
| | | | | | sequence | |
| primer | | 324 | Amplify MGC14-1_spacer 3 | nucleotide | artificial | |
| | | | | | sequence | |
| primer | | 325 | Amplify MGC15-1_spacer 1 | nucleotide | artificial | |
| | | | | | sequence | |
| primer | | 326 | Amplify MGC15-1_spacer 1 | nucleotide | artificial | |
| | | | | | sequence | |
| primer | | 327 | Amplify MGC15-1_spacer 2 | nucleotide | artificial | |
| | | | | | sequence | |
| primer | | 328 | Amplify MGC15-1_spacer 2 | nucleotide | artificial | |
| | | | | | sequence | |
| primer | | 329 | Amplify MGC15-1_spacer 3 | nucleotide | artificial | |
| | | | | | sequence | |
| primer | | 330 | Amplify MGC15-1_spacer 3 | nucleotide | artificial | |
| | | | | | sequence | |
| primer | | 331 | Amplify MGC18-1_spacer 1 | nucleotide | artificial | |
| | | | | | sequence | |
| primer | | 332 | Amplify MGC18-1_spacer 1 | nucleotide | artificial | |
| | | | | | sequence | |
| primer | | 333 | Amplify MGC18-1_spacer 2 | nucleotide | artificial | |
| | | | | | sequence | |
| primer | | 334 | Amplify MGC18-1_spacer 2 | nucleotide | artificial | |
| | | | | | sequence | |
| primer | | 335 | Amplify MGC18-1_spacer 3 | nucleotide | artificial | |
| | | | | | sequence | |
| primer | | 336 | Amplify MGC18-1_spacer 3 | nucleotide | artificial | |
| | | | | | sequence | |
| primer | | 337 | Amplify BE3_sgRNA spacer 1 | nucleotide | artificial | |
| | | | | | sequence | |
| primer | | 338 | Amplify BE3_sgRNA spacer 1 | nucleotide | artificial | |
| | | | | | sequence | |
| primer | | 339 | Amplify BE3_sgRNA spacer 2 | nucleotide | artificial | |
| | | | | | sequence | |
| primer | | 340 | Amplify BE3_sgRNA spacer 2 | nucleotide | artificial | |
| | | | | | sequence | |
| primer | | 341 | Amplify BE3_sgRNA spacer 3 | nucleotide | artificial | |
| | | | | | sequence | |
| primer | | 342 | Amplify BE3_sgRNA spacer 3 | nucleotide | artificial | |
| | | | | | sequence | |
| primer | | 343 | For lacZ sequencing | nucleotide | artificial | |
| | | | | | sequence | |
| primer | | 344 | For lacZ sequencing | nucleotide | artificial | |
| | | | | | sequence | |
| primer | | 345 | For lacZ sequencing | nucleotide | artificial | |
| | | | | | sequence | |
| primer | | 346 | Amplify sgRNA expression cassette | nucleotide | artificial | |
| | | | | | sequence | |
| primer | | 347 | Amplify sgRNA expression cassette | nucleotide | artificial | |
| | | | | | sequence | |
| primer | | 348 | Amplify MGA3-8_sgRNA spacer 1 | nucleotide | artificial | |
| | | | | | sequence | |
| primer | | 349 | Amplify MGA3-8_sgRNA spacer 1 | nucleotide | artificial | |
| | | | | | sequence | |
| primer | | 350 | Amplify MGA3-8_sgRNA spacer 2 | nucleotide | artificial | |
| | | | | | sequence | |
| primer | | 351 | Amplify MGA3-8_sgRNA spacer 2 | nucleotide | artificial | |
| | | | | | sequence | |
| primer | | 352 | Amplify MGA3-8_sgRNA spacer 3 | nucleotide | artificial | |
| | | | | | sequence | |
| primer | | 353 | Amplify MGA3-8_sgRNA spacer 3 | nucleotide | artificial | |
| | | | | | sequence | |
| primer | | 354 | Amplify MGC3-8_sgRNA spacer 1 | nucleotide | artificial | |
| | | | | | sequence | |
| primer | | 355 | Amplify MGC3-8_sgRNA spacer 1 | nucleotide | artificial | |
| | | | | | sequence | |
| primer | | 356 | Amplify MGC3-8_sgRNA spacer 2 | nucleotide | artificial | |
| | | | | | sequence | |
| primer | | 357 | Amplify MGC3-8_sgRNA spacer 2 | nucleotide | artificial | |
| | | | | | sequence | |
| primer | | 358 | Amplify MGC3-8_sgRNA spacer 3 | nucleotide | artificial | |
| | | | | | sequence | |
| primer | | 359 | Amplify MGC3-8_sgRNA spacer 3 | nucleotide | artificial | |
| | | | | | sequence | |
| PAM | A360 | | nMG1-4 (D9A) nickase PAM | nucleotide | artificial | nRRR |
| | | | | | sequence | |
| PAM | A361 | | nMG1-6 (D13A) nickase PAM | nucleotide | artificial | nnRRAY |
| | | | | | sequence | |
| PAM | A362 | | nMG3-6 (D13A) nickase PAM | nucleotide | artificial | nnRGGnT |
| | | | | | sequence | |
| PAM | A363 | | nMG3-7 (D12A) nickase PAM | nucleotide | artificial | nnRnYAY |
| | | | | | sequence | |
| PAM | A364 | | nMG3-8 (D13A) nickase PAM | nucleotide | artificial | nnRGGTY |
| | | | | | sequence | |
| PAM | A365 | | nMG4-5 (D17A) nickase PAM | nucleotide | artificial | nRCCV |
| | | | | | sequence | |
| PAM | A366 | | nMG14-1 (D23A) nickase PAM | nucleotide | artificial | nRnnGRKA |
| | | | | | sequence | |
| PAM | A367 | | nMG15-1 (D8A) nickase PAM | nucleotide | artificial | nnnnC |
| | | | | | sequence | |
| PAM | | 368 | nMG18-1 (D12A) nickase PAM | nucleotide | artificial | nRWART |
| | | | | | sequence | |
| NLS | | 369 | SV40 | nucleotide | artificial | Nuclear |
| | | | | | sequence | localization |
| | | | | | | sequence |
| NLS | | 370 | nucleoplasmin bipartite NLS | nucleotide | | Nuclear |
| | | | | | | localization |
| | | | | | | sequence |
| NLS | | 371 | c-myc NLS | nucleotide | | Nuclear |
| | | | | | | localization |
| | | | | | | sequence |
| NLS | | 372 | c-myc NLS | nucleotide | | Nuclear |
| | | | | | | localization |
| | | | | | | sequence |
| NLS | | 373 | bRNPA1 M9 NLS | nucleotide | | Nuclear |
| | | | | | | localization |
| | | | | | | sequence |
| NLS | | 374 | Importin-alpha IBB domain | nucleotide | | Nuclear |
| | | | | | | localization |
| | | | | | | sequence |
| NLS | | 375 | Myoma T protein | nucleotide | | Nuclear |
| | | | | | | localization |
| | | | | | | sequence |
| NLS | | 376 | Myoma T protein | nucleotide | | Nuclear |
| | | | | | | localization |
| | | | | | | sequence |
| NLS | | 377 | p53 | nucleotide | | Nuclear |
| | | | | | | localization |
| | | | | | | sequence |
| NLS | | 378 | mouse c-abl IV | nucleotide | | Nuclear |
| | | | | | | localization |
| | | | | | | sequence |
| NLS | | 379 | influenza virus NS1 | nucleotide | | Nuclear |
| | | | | | | localization |
| | | | | | | sequence |
| NLS | | 380 | influenza virus NS1 | nucleotide | | Nuclear |
| | | | | | | localization |
| | | | | | | sequence |
| NLS | | 381 | Hepatitis virus delta antigen | nucleotide | | Nuclear |
| | | | | | | localization |
| | | | | | | sequence |
| NLS | | 382 | mouse Mx1 protein | nucleotide | | Nuclear |
| | | | | | | localization |
| | | | | | | sequence |
| NLS | | 383 | human poly(ADP-ribose) polymerase | nucleotide | | Nuclear |
| | | | | | | localization |
| | | | | | | sequence |
| NLS | | 384 | steroid hormone receptor (human) | nucleotide | | Nuclear |
| | | | glucocorticoid | | | localization |
| | | | | | | sequence |
| MG68 | | 385 | MG68-3 deaminase | protein | unknown | uncultivated |
| putative | | | | | | organism |
| adenosine | | | | | | |
| deaminase | | | | | | |
| (TadA- | | | | | | |
| like) | | | | | | |
| MG68 | | 386 | MG68-4 deaminase | protein | unknown | uncultivated |
| putative | | | | | | organism |
| adenosine | | | | | | |
| deaminase | | | | | | |
| (TadA- | | | | | | |
| like) | | | | | | |
| MG68 | | 387 | MG68-5 deaminase | protein | unknown | uncultivated |
| putative | | | | | | organism |
| adenosine | | | | | | |
| deaminase | | | | | | |
| (TadA- | | | | | | |
| like) | | | | | | |
| MG68 | | 388 | MG68-6 deaminase | protein | unknown | uncultivated |
| putative | | | | | | organism |
| adenosine | | | | | | |
| deaminase | | | | | | |
| (TadA- | | | | | | |
| like) | | | | | | |
| MG68 | | 389 | MG68-7 deaminase | protein | unknown | uncultivated |
| putative | | | | | | organism |
| adenosine | | | | | | |
| deaminase | | | | | | |
| (TadA- | | | | | | |
| like) | | | | | | |
| MG68 | | 390 | MG68-8 deaminase | protein | unknown | uncultivated |
| putative | | | | | | organism |
| adenosine | | | | | | |
| deaminase | | | | | | |
| (TadA- | | | | | | |
| like) | | | | | | |
| MG68 | | 391 | MG68-9 deaminase | protein | unknown | uncultivated |
| putative | | | | | | organism |
| adenosine | | | | | | |
| deaminase | | | | | | |
| (TadA- | | | | | | |
| like) | | | | | | |
| MG68 | | 392 | MG68-10 deaminase | protein | unknown | uncultivated |
| putative | | | | | | organism |
| adenosine | | | | | | |
| deaminase | | | | | | |
| (TadA- | | | | | | |
| like | | | | | | |
| MG68 | | 393 | MG68-11 deaminase | protein | unknown | uncultivated |
| putative | | | | | | organism |
| adenosine | | | | | | |
| deaminase | | | | | | |
| (TadA- | | | | | | |
| like) | | | | | | |
| MG68 | | 394 | MG68-12 deaminase | protein | unknown | uncultivated |
| putative | | | | | | organism |
| adenosine | | | | | | |
| deaminase | | | | | | |
| (TadA- | | | | | | |
| like) | | | | | | |
| MG68 | | 395 | MG68-13 deaminase | protein | unknown | uncultivated |
| putative | | | | | | organism |
| adenosine | | | | | | |
| deaminase | | | | | | |
| (TadA- | | | | | | |
| like) | | | | | | |
| MG68 | | 396 | MG68-14 deaminase | protein | unknown | uncultivated |
| putative | | | | | | organism |
| adenosine | | | | | | |
| deaminase | | | | | | |
| (TadA- | | | | | | |
| like) | | | | | | |
| MG68 | | 397 | MG68-15 deaminase | protein | unknown | uncultivated |
| putative | | | | | | organism |
| adenosine | | | | | | |
| deaminase | | | | | | |
| (TadA- | | | | | | |
| like) | | | | | | |
| MG68 | | 398 | MG68-16 deaminase | protein | unknown | uncultivated |
| putative | | | | | | organism |
| adenosine | | | | | | |
| deaminase | | | | | | |
| (TadA- | | | | | | |
| like) | | | | | | |
| MG68 | | 399 | MG68-17 deaminase | protein | unknown | uncultivated |
| putative | | | | | | organism |
| adenosine | | | | | | |
| deaminase | | | | | | |
| (TadA- | | | | | | |
| like) | | | | | | |
| MG68 | | 400 | MG68-18 deaminase | protein | unknown | uncultivated |
| putative | | | | | | organism |
| adenosine | | | | | | |
| deaminase | | | | | | |
| (TadA- | | | | | | |
| like) | | | | | | |
| MG68 | | 401 | MG68-19 deaminase | protein | unknown | uncultivated |
| putative | | | | | | organism |
| adenosine | | | | | | |
| deaminase | | | | | | |
| (TadA- | | | | | | |
| like) | | | | | | |
| MG68 | | 402 | MG68-20 deaminase | protein | unknown | uncultivated |
| putative | | | | | | organism |
| adenosine | | | | | | |
| deaminase | | | | | | |
| (TadA- | | | | | | |
| like) | | | | | | |
| MG68 | | 403 | MG68-21 deaminase | protein | unknown | uncultivated |
| putative | | | | | | organism |
| adenosine | | | | | | |
| deaminase | | | | | | |
| (TadA- | | | | | | |
| like) | | | | | | |
| MG68 | | 404 | MG68-22 deaminase | protein | unknown | uncultivated |
| putative | | | | | | organism |
| adenosine | | | | | | |
| deaminase | | | | | | |
| (TadA- | | | | | | |
| like) | | | | | | |
| MG68 | | 405 | MG68-23 deaminase | protein | unknown | uncultivated |
| putative | | | | | | organism |
| adenosine | | | | | | |
| deaminase | | | | | | |
| (TadA- | | | | | | |
| like) | | | | | | |
| MG68 | | 406 | MG68-24 deaminase | protein | unknown | uncultivated |
| putative | | | | | | organism |
| adenosine | | | | | | |
| deaminase | | | | | | |
| (TadA- | | | | | | |
| like) | | | | | | |
| MG68 | | 407 | MG68-25 deaminase | protein | unknown | uncultivated |
| putative | | | | | | organism |
| adenosine | | | | | | |
| deaminase | | | | | | |
| (TadA- | | | | | | |
| like) | | | | | | |
| MG68 | | 408 | MG68-26 deaminase | protein | unknown | uncultivated |
| putative | | | | | | organism |
| adenosine | | | | | | |
| deaminase | | | | | | |
| (TadA- | | | | | | |
| like) | | | | | | |
| MG68 | | 409 | MG68-27 deaminase | protein | unknown | uncultivated |
| putative | | | | | | organism |
| adenosine | | | | | | |
| deaminase | | | | | | |
| (TadA- | | | | | | |
| like) | | | | | | |
| MG68 | | 410 | MG68-28 deaminase | protein | unknown | uncultivated |
| putative | | | | | | organism |
| adenosine | | | | | | |
| deaminase | | | | | | |
| (TadA- | | | | | | |
| like) | | | | | | |
| MG68 | | 411 | MG68-29 deaminase | protein | unknown | uncultivated |
| putative | | | | | | organism |
| adenosine | | | | | | |
| deaminase | | | | | | |
| (TadA- | | | | | | |
| like) | | | | | | |
| MG68 | | 412 | MG68-30 deaminase | protein | unknown | uncultivated |
| putative | | | | | | organism |
| adenosine | | | | | | |
| deaminase | | | | | | |
| (TadA- | | | | | | |
| like) | | | | | | |
| MG68 | | 413 | MG68-31 deaminase | protein | unknown | uncultivated |
| putative | | | | | | organism |
| adenosine | | | | | | |
| deaminase | | | | | | |
| (TadA- | | | | | | |
| like) | | | | | | |
| MG68 | | 414 | MG68-32 deaminase | protein | unknown | uncultivated |
| putative | | | | | | organism |
| adenosine | | | | | | |
| deaminase | | | | | | |
| (TadA- | | | | | | |
| like) | | | | | | |
| MG68 | | 415 | MG68-33 deaminase | protein | unknown | uncultivated |
| putative | | | | | | organism |
| adenosine | | | | | | |
| deaminase | | | | | | |
| (TadA- | | | | | | |
| like) | | | | | | |
| MG68 | | 416 | MG68-34 deaminase | protein | unknown | uncultivated |
| putative | | | | | | organism |
| adenosine | | | | | | |
| deaminase | | | | | | |
| (TadA- | | | | | | |
| like) | | | | | | |
| MG68 | | 417 | MG68-35 deaminase | protein | unknown | uncultivated |
| putative | | | | | | organism |
| adenosine | | | | | | |
| deaminase | | | | | | |
| (TadA- | | | | | | |
| like | | | | | | |
| MG68 | | 418 | MG68-36 deaminase | protein | unknown | uncultivated |
| putative | | | | | | organism |
| adenosine | | | | | | |
| deaminase | | | | | | |
| (TadA- | | | | | | |
| like) | | | | | | |
| MG68 | | 419 | MG68-37 deaminase | protein | unknown | uncultivated |
| putative | | | | | | organism |
| adenosine | | | | | | |
| deaminase | | | | | | |
| (TadA- | | | | | | |
| like | | | | | | |
| MG68 | | 420 | MG68-38 deaminase | protein | unknown | uncultivated |
| putative | | | | | | organism |
| adenosine | | | | | | |
| deaminase | | | | | | |
| (TadA- | | | | | | |
| like) | | | | | | |
| MG68 | | 421 | MG68-39 deaminase | protein | unknown | uncultivated |
| putative | | | | | | organism |
| adenosine | | | | | | |
| deaminase | | | | | | |
| (TadA- | | | | | | |
| like) | | | | | | |
| MG68 | | 422 | MG68-40 deaminase | protein | unknown | uncultivated |
| putative | | | | | | organism |
| adenosine | | | | | | |
| deaminase | | | | | | |
| (TadA- | | | | | | |
| like) | | | | | | |
| MG68 | | 423 | MG68-41 deaminase | protein | unknown | uncultivated |
| putative | | | | | | organism |
| adenosine | | | | | | |
| deaminase | | | | | | |
| (TadA- | | | | | | |
| like) | | | | | | |
| MG68 | | 424 | MG68-42 deaminase | protein | unknown | uncultivated |
| putative | | | | | | organism |
| adenosine | | | | | | |
| deaminase | | | | | | |
| (TadA- | | | | | | |
| like) | | | | | | |
| MG68 | | 425 | MG68-43 deaminase | protein | unknown | uncultivated |
| putative | | | | | | organism |
| adenosine | | | | | | |
| deaminase | | | | | | |
| (TadA- | | | | | | |
| like) | | | | | | |
| MG68 | | 426 | MG68-44 deaminase | protein | unknown | uncultivated |
| putative | | | | | | organism |
| adenosine | | | | | | |
| deaminase | | | | | | |
| (TadA- | | | | | | |
| like) | | | | | | |
| MG68 | | 427 | MG68-45 deaminase | protein | unknown | uncultivated |
| putative | | | | | | organism |
| adenosine | | | | | | |
| deaminase | | | | | | |
| (TadA- | | | | | | |
| like) | | | | | | |
| MG68 | | 428 | MG68-46 deaminase | protein | unknown | uncultivated |
| putative | | | | | | organism |
| adenosine | | | | | | |
| deaminase | | | | | | |
| (TadA- | | | | | | |
| like) | | | | | | |
| MG68 | | 429 | MG68-47 deaminase | protein | unknown | uncultivated |
| putative | | | | | | organism |
| adenosine | | | | | | |
| deaminase | | | | | | |
| (TadA- | | | | | | |
| like) | | | | | | |
| MG68 | | 430 | MG68-48 deaminase | protein | unknown | uncultivated |
| putative | | | | | | organism |
| adenosine | | | | | | |
| deaminase | | | | | | |
| (TadA- | | | | | | |
| like) | | | | | | |
| MG68 | | 431 | MG68-49 deaminase | protein | unknown | uncultivated |
| putative | | | | | | organism |
| adenosine | | | | | | |
| deaminase | | | | | | |
| (TadA- | | | | | | |
| like) | | | | | | |
| MG68 | | 432 | MG68-50 deaminase | protein | unknown | uncultivated |
| putative | | | | | | organism |
| adenosine | | | | | | |
| deaminase | | | | | | |
| (TadA- | | | | | | |
| like) | | | | | | |
| MG68 | | 433 | MG68-51 deaminase | protein | unknown | uncultivated |
| putative | | | | | | organism |
| adenosine | | | | | | |
| deaminase | | | | | | |
| (TadA- | | | | | | |
| like) | | | | | | |
| MG68 | | 434 | MG68-52 deaminase | protein | unknown | uncultivated |
| putative | | | | | | organism |
| adenosine | | | | | | |
| deaminase | | | | | | |
| (TadA- | | | | | | |
| like) | | | | | | |
| MG68 | | 435 | MG68-53 deaminase | protein | unknown | uncultivated |
| putative | | | | | | organism |
| adenosine | | | | | | |
| deaminase | | | | | | |
| (TadA- | | | | | | |
| like) | | | | | | |
| MG68 | | 436 | MG68-54 deaminase | protein | unknown | uncultivated |
| putative | | | | | | organism |
| adenosine | | | | | | |
| deaminase | | | | | | |
| (TadA- | | | | | | |
| like) | | | | | | |
| MG68 | | 437 | MG68-55 deaminase | protein | unknown | uncultivated |
| putative | | | | | | organism |
| adenosine | | | | | | |
| deaminase | | | | | | |
| (TadA- | | | | | | |
| like) | | | | | | |
| MG68 | | 438 | MG68-56 deaminase | protein | unknown | uncultivated |
| putative | | | | | | organism |
| adenosine | | | | | | |
| deaminase | | | | | | |
| (TadA- | | | | | | |
| like) | | | | | | |
| MG68 | | 439 | MG68-57 deaminase | protein | unknown | uncultivated |
| putative | | | | | | organism |
| adenosine | | | | | | |
| deaminase | | | | | | |
| (TadA- | | | | | | |
| like) | | | | | | |
| MG68 | | 440 | MG68-58 deaminase | protein | unknown | uncultivated |
| putative | | | | | | organism |
| adenosine | | | | | | |
| deaminase | | | | | | |
| (TadA- | | | | | | |
| like) | | | | | | |
| MG68 | | 441 | MG68-59 deaminase | protein | unknown | uncultivated |
| putative | | | | | | organism |
| adenosine | | | | | | |
| deaminase | | | | | | |
| (TadA- | | | | | | |
| like) | | | | | | |
| MG68 | | 442 | MG68-60 deaminase | protein | unknown | uncultivated |
| putative | | | | | | organism |
| adenosine | | | | | | |
| deaminase | | | | | | |
| (TadA- | | | | | | |
| like) | | | | | | |
| MG68 | | 443 | MG68-61 deaminase | protein | unknown | uncultivated |
| putative | | | | | | organism |
| adenosine | | | | | | |
| deaminase | | | | | | |
| (TadA- | | | | | | |
| like) | | | | | | |
| MG121 | | 444 | MG121-1 deaminase | protein | unknown | uncultivated |
| deaminase | | | | | | organism |
| MG121 | | 445 | MG121-2 deaminase | protein | unknown | uncultivated |
| deaminase | | | | | | organism |
| MG121 | | 446 | MG121-3 deaminase | protein | unknown | uncultivated |
| deaminase | | | | | | organism |
| MG121 | | 447 | MG121-4 deaminase | protein | unknown | uncultivated |
| deaminase | | | | | | organism |
| MG68 | | 448 | MG68-4_V1 | protein | artificial | |
| putative | | | | | sequence | |
| adenosine | | | | | | |
| deaminase | | | | | | |
| (TadA- | | | | | | |
| like) | | | | | | |
| MG68 | | 449 | MG68-4_V2 | protein | artificial | |
| putative | | | | | sequence | |
| adenosine | | | | | | |
| deaminase | | | | | | |
| (TadA- | | | | | | |
| like) | | | | | | |
| MG68 | | 450 | MG68-4_V3 | protein | artificial | |
| putative | | | | | sequence | |
| adenosine | | | | | | |
| deaminase | | | | | | |
| (TadA- | | | | | | |
| like) | | | | | | |
| MG68 | | 451 | MG68-4_V4 | protein | artificial | |
| putative | | | | | sequence | |
| adenosine | | | | | | |
| deaminase | | | | | | |
| (TadA- | | | | | | |
| like) | | | | | | |
| MG68 | | 452 | MG68-4_V5 | protein | artificial | |
| putative | | | | | sequence | |
| adenosine | | | | | | |
| deaminase | | | | | | |
| (TadA- | | | | | | |
| like) | | | | | | |
| MG68 | | 453 | MG68-4_V6 | protein | artificial | |
| putative | | | | | sequence | |
| adenosine | | | | | | |
| deaminase | | | | | | |
| (TadA- | | | | | | |
| like) | | | | | | |
| MG68 | | 454 | MG68-4_V7 | protein | artificial | |
| putative | | | | | sequence | |
| adenosine | | | | | | |
| deaminase | | | | | | |
| (TadA- | | | | | | |
| like) | | | | | | |
| MG68 | | 455 | MG68-4_V8 | protein | artificial | |
| putative | | | | | sequence | |
| adenosine | | | | | | |
| deaminase | | | | | | |
| (TadA- | | | | | | |
| like) | | | | | | |
| MG68 | | 456 | MG68-4_V9 | protein | artificial | |
| putative | | | | | sequence | |
| adenosine | | | | | | |
| deaminase | | | | | | |
| (TadA- | | | | | | |
| like) | | | | | | |
| MG68 | | 457 | MG68-4_V10 | protein | artificial | |
| putative | | | | | | |
| adenosine | | | | | sequence | |
| deaminase | | | | | | |
| (TadA- | | | | | | |
| like) | | | | | | |
| MG68 | | 458 | MG68-4_V11 | protein | artificial | |
| putative | | | | | sequence | |
| adenosine | | | | | | |
| deaminase | | | | | | |
| (TadA- | | | | | | |
| like) | | | | | | |
| MG68 | | 459 | MG68-4_V12 | protein | artificial | |
| putative | | | | | sequence | |
| adenosine | | | | | | |
| deaminase | | | | | | |
| (TadA- | | | | | | |
| like) | | | | | | |
| MG68 | | 460 | MG68-4_V13 | protein | artificial | |
| putative | | | | | sequence | |
| adenosine | | | | | | |
| deaminase | | | | | | |
| (TadA- | | | | | | |
| like) | | | | | | |
| MG68 | | 461 | MG68-4_V14 | protein | artificial | |
| putative | | | | | sequence | |
| adenosine | | | | | | |
| deaminase | | | | | | |
| (TadA- | | | | | | |
| like) | | | | | | |
| MG68 | | 462 | MG68-4_V15 | protein | artificial | |
| putative | | | | | sequence | |
| adenosine | | | | | | |
| deaminase | | | | | | |
| (TadA- | | | | | | |
| like) | | | | | | |
| MG68 | | 463 | MG68-4_V16 | protein | artificial | |
| putative | | | | | sequence | |
| adenosine | | | | | | |
| deaminase | | | | | | |
| (TadA- | | | | | | |
| like) | | | | | | |
| MG68 | | 464 | MG68-4_V17 | protein | artificial | |
| putative | | | | | sequence | |
| adenosine | | | | | | |
| deaminase | | | | | | |
| (TadA- | | | | | | |
| like) | | | | | | |
| MG68 | | 465 | MG68-4_V18 | protein | artificial | |
| putative | | | | | sequence | |
| adenosine | | | | | | |
| deaminase | | | | | | |
| (TadA- | | | | | | |
| like) | | | | | | |
| MG68 | | 466 | MG68-4_V19 | protein | artificial | |
| putative | | | | | sequence | |
| adenosine | | | | | | |
| deaminase | | | | | | |
| (TadA- | | | | | | |
| like) | | | | | | |
| MG68 | | 467 | MG68-4_V20 | protein | artificial | |
| putative | | | | | sequence | |
| adenosine | | | | | | |
| deaminase | | | | | | |
| (TadA- | | | | | | |
| like) | | | | | | |
| MG68 | | 468 | MG68-4_V21 | protein | artificial | |
| putative | | | | | sequence | |
| adenosine | | | | | | |
| deaminase | | | | | | |
| (TadA- | | | | | | |
| like) | | | | | | |
| MG68 | | 469 | MG68-4_V22 | protein | artificial | |
| putative | | | | | sequence | |
| adenosine | | | | | | |
| deaminase | | | | | | |
| (TadA- | | | | | | |
| like) | | | | | | |
| MG68 | | 470 | MG68-4_V23 | protein | artificial | |
| putative | | | | | sequence | |
| adenosine | | | | | | |
| deaminase | | | | | | |
| (TadA- | | | | | | |
| like) | | | | | | |
| MG68 | | 471 | MG68-4_V24 | protein | artificial | |
| putative | | | | | sequence | |
| adenosine | | | | | | |
| deaminase | | | | | | |
| (TadA- | | | | | | |
| like) | | | | | | |
| MG68 | | 472 | MG68-4_V25 | protein | artificial | |
| putative | | | | | sequence | |
| adenosine | | | | | | |
| deaminase | | | | | | |
| (TadA- | | | | | | |
| like) | | | | | | |
| MG68 | | 473 | MG68-4_V26 | protein | artificial | |
| putative | | | | | sequence | |
| adenosine | | | | | | |
| deaminase | | | | | | |
| (TadA- | | | | | | |
| like) | | | | | | |
| MG68 | | 474 | MG68-4_V27 | protein | artificial | |
| putative | | | | | sequence | |
| adenosine | | | | | | |
| deaminase | | | | | | |
| (TadA- | | | | | | |
| like) | | | | | | |
| MG68 | | 475 | MG68-4_V28 | protein | artificial | |
| putative | | | | | sequence | |
| adenosine | | | | | | |
| deaminase | | | | | | |
| (TadA- | | | | | | |
| like) | | | | | | |
| adenine | | 476 | MG68-4_V1-nMG34-1 (D10A) | protein | artificial | |
| base | | | | | sequence | |
| editor | | | | | | |
| adenine | | 477 | MG68-4_V1-nSpCas9 (D10A) | protein | artificial | |
| base | | | | | sequence | |
| editor | | | | | | |
| cytosine | | 478 | rAPOBEC1-nMG15-1 (D8A) | protein | artificial | |
| base | | | | | sequence | |
| editor | | | | | | |
| cytosine | | 479 | rAPOBEC1-nMG15-1 (D&A)-UGI | protein | artificial | |
| base | | | (PBS1) | | sequence | |
| editor | | | | | | |
| cytosine | | 480 | rAPOBEC1-nMG15-1 (D8A)-MG69-1 | protein | artificial | |
| base | | | | | sequence | |
| editor | | | | | | |
| cytosine | | 481 | rAPOBEC1-nMG15-1 (D8A)-MG69-2 | protein | artificial | |
| base | | | | | sequence | |
| editor | | | | | | |
| cytosine | | 482 | rAPOBEC1-nMG15-1 (D8A)-MG69- | protein | artificial | |
| base | | | | | sequence | |
| editor | | | | | | |
| Plasmid | | 483 | pET21-CAT (H193Y)-sgRNA-TadA- | nucleotide | artificial | |
| | | | nSpCas9 (D10A) | | sequence | |
| Plasmid | | 484 | pET21-sgRNA-TadA (ABE8.17m)- | nucleotide | artificial | |
| | | | nMG34-1 (D10A) | | sequence | |
| Plasmid | | 485 | pET21-sgRNA-rAPOBEC1-nMG34-1 | nucleotide | artificial | |
| | | | (DIOA)-UGI (PBS1) | | sequence | |
| Plasmid | | 486 | pET21-CAT (H193Y)-sgRNA-MG68- | nucleotide | artificial | |
| | | | 4 (D109N)-nMG34-1 (D10A) | | sequence | |
| Plasmid | | 487 | pET21-CAT (H193Y)-sgRNA-MG68- | nucleotide | artificial | |
| | | | 4 (D109N)-nSpCas9 (D10A) | | sequence | |
| sgRNA | | 488 | MG15-1 | nucleotide | artificial | |
| scaffold | | | | | sequence | |
| sequence | | | | | | |
| sgRNA | | 489 | MG34-1 | nucleotide | artificial | |
| scaffold | | | | | sequence | |
| sequence | | | | | | |
| spacer | | 490 | rAPOBEC1-nMG15-1 (D8A) in E. coli | nucleotide | artificial | |
| | | | | | sequence | |
| spacer | | 491 | rAPOBEC1-nMG15-1 (D8A)-UGI | nucleotide | artificial | |
| | | | (PBS1) in E. coli | | sequence | |
| spacer | | 492 | rAPOBEC1-nMG15-1 (D8A)-MG69-1 | nucleotide | artificial | |
| | | | in E. coli | | sequence | |
| spacer | | 493 | rAPOBEC1-nMG15-1 (D8A)-MG69-2 | nucleotide | artificial | |
| | | | in E. coli | | sequence | |
| spacer | | 494 | rAPOBEC1-nMG15-1 (D8A)-MG69-3 | nucleotide | artificial | |
| | | | in E. coli | | sequence | |
| spacer | | 495 | rAPOBEC1-nSpCas9 (D10A)-UGI | nucleotide | artificial | |
| | | | (PBS1) in HEK293T | | sequence | |
| spacer | | 496 | rAPOBEC1-nSpCas9 (D10A) in | nucleotide | artificial | |
| | | | HEK293T | | sequence | |
| spacer | | 497 | rAPOBEC1-nSpCas9 (D10A)~MG69-1 | nucleotide | artificial | |
| | | | in HEK293T | | sequence | |
| spacer | | 498 | rAPOBEC1-nSpCas9 (D10A)-MG69-2 | nucleotide | artificial | |
| | | | in HEK293T | | sequence | |
| spacer | | 499 | A0A2K5RDN7-nMG1-4 (D9A)- | nucleotide | artificial | |
| | | | MG69-1_site 1 in HEK293T | | sequence | |
| spacer | | 500 | A0A2K5RDN7-nMG1-4 (D9A)- | nucleotide | artificial | |
| | | | MG69-1_site 2 in HEK293T | | sequence | |
| spacer | | 501 | A0A2K5RDN7-nMG1-4 (D9A)- | nucleotide | artificial | |
| | | | MG69-1_site 3 in HEK293T | | sequence | |
| spacer | | 502 | A0A2K5RDN7-nMG1-4 (D9A)- | nucleotide | artificial | |
| | | | MG69-1_site 4 in HEK293T | | sequence | |
| spacer | | 503 | A0A2K5RDN7-nMG3-6 (D13A)- | nucleotide | artificial | |
| | | | MG69-1_site 1 in HEK293T | | sequence | |
| spacer | | 504 | A0A2K5RDN7-nMG3-6 (D13A)- | nucleotide | artificial | |
| | | | MG69-1_site 2 in HEK293T | | sequence | |
| spacer | | 505 | A0A2KSRDN7-nMG3-6 (D13A)- | nucleotide | artificial | |
| | | | MG69-1_site 3 in HEK293T | | sequence | |
| spacer | | 506 | A0A2K5RDN7-nMG3-6 (D13A)- | nucleotide | artificial | |
| | | | MG69-1_site 4 in HEK293T | | sequence | |
| spacer | | 507 | A0A2K5RDN7-nMG3-6 (D13A)- | nucleotide | artificial | |
| | | | MG69-1_site 5 in HEK293T | | sequence | |
| spacer | | 508 | A0A2K5RDN7-nMG3-6 (D13A)- | nucleotide | artificial | |
| | | | MG69-1_site 6 in HEK293T | | sequence | |
| spacer | | 509 | A0A2K5RDN7-nMG3-6 (D13A)- | nucleotide | artificial | |
| | | | MG69-1_site 7 in HEK293T | | sequence | |
| spacer | | 510 | A0A2K5RDN7-nMG4-2 (D28A)- | nucleotide | artificial | |
| | | | MG69-1_site 1 in HEK293T | | sequence | |
| spacer | | 511 | A0A2K5RDN7-nMG4-2 (D28A)- | nucleotide | artificial | |
| | | | MG69-1_site 2 in HEK293T | | sequence | |
| spacer | | 512 | A0A2K5RDN7-nMG4-2 (D28A)- | nucleotide | artificial | |
| | | | MG69-1_site 3 in HEK293T | | sequence | |
| spacer | | 513 | A0A2K5RDN7-nMG4-2 (D28A)- | nucleotide | artificial | |
| | | | MG69-1_site 4 in HEK293T | | sequence | |
| spacer | | 514 | A0A2K5RDN7-nMG18-1 (D12A)- | nucleotide | artificial | |
| | | | MG69-1_site 1 in HEK293T | | sequence | |
| spacer | | 515 | A0A2K5RDN7-nMG18-1 (D12A)- | nucleotide | artificial | |
| | | | MG69-1_site 2 in HEK293T | | sequence | |
| spacer | | 516 | A0A2K5RDN7-nMG18-1 (D12A)- | nucleotide | artificial | |
| | | | MG69-1_site 3 in HEK293T | | sequence | |
| spacer | | 517 | A0A2K5RDN7-nMG18-1 (D12A)- | nucleotide | artificial | |
| | | | MG69-1_site 4 in HEK293T | | sequence | |
| spacer | | 518 | A0A2K5RDN7-nSpCas9 (D10A)- | nucleotide | artificial | |
| | | | MG69-1_site 1 in HEK293T | | sequence | |
| spacer | | 519 | A0A2K5RDN7-nSpCas9 (D10A)- | nucleotide | artificial | |
| | | | MG69-1_site 2 in HEK293T | | sequence | |
| spacer | | 520 | A0A2K5RDN7-nSpCas9 (D10A)- | nucleotide | artificial | |
| | | | MG69-1_site 3 in HEK293T | | sequence | |
| spacer | | 521 | A0A2K5RDN7-nSpCas9 (D10A)- | nucleotide | artificial | |
| | | | MG69-1_site 4 in HEK293T | | sequence | |
| spacer | | 522 | A0A2K5RDN7-nSpCas9 (D10A)- | nucleotide | artificial | |
| | | | MG69-1_site 5 in HEK293T | | sequence | |
| primer | | 523 | Forward primer used to amplify lacZ of | nucleotide | artificial | |
| | | | E. coli and Sanger sequencing | | sequence | |
| primer | | 524 | Reverse primer used to amplify lacZ of | nucleotide | artificial | |
| | | | E. coli and Sanger sequencing | | sequence | |
| primer | | 525 | Sanger sequencing of base edit of lacZ | nucleotide | artificial | |
| | | | of E. coli | | sequence | |
| primer | | 526 | Sanger sequencing of base edit of lacZ | nucleotide | artificial | |
| | | | of E. coli | | sequence | |
| primer | | 527 | Sanger sequencing of base edit of lacZ | nucleotide | artificial | |
| | | | of E. coli | | sequence | |
| primer | | 528 | Sanger sequencing of base edit of lacZ | nucleotide | artificial | |
| | | | of E. coli | | sequence | |
| primer | | 529 | Sanger sequencing of base edit of lacZ | nucleotide | artificial | |
| | | | of E. coli | | sequence | |
| primer | | 530 | Sanger sequencing of base edit of lacZ | nucleotide | artificial | |
| | | | of E. coli | | sequence | |
| primer | | 531 | Sanger sequencing of base edit of lacZ | nucleotide | artificial | |
| | | | of E. coli | | sequence | |
| primer | | 532 | Forward primer used to amplify CAT | nucleotide | artificial | |
| | | | (H193Y) of CAT (H193Y)-sgRNA- | | sequence | |
| | | | MG68-4 variant-nSpCas9 (D10A) | | | |
| primer | | 533 | Reverse primer used to amplify CAT | nucleotide | artificial | |
| | | | (H193Y) of CAT (H193Y)-sgRNA- | | sequence | |
| | | | MG68-4 variant-nSpCas9 | | | |
| primer | | 534 | Forward primer used to amplify CAT | nucleotide | artificial | |
| | | | (H193Y) of CAT (H193Y)-sgRNA- | | sequence | |
| | | | MG68-4 variant-nMG34-1 (D10A) | | | |
| primer | | 535 | Sanger sequencing primer of CAT | nucleotide | artificial | |
| | | | (H193Y) | | sequence | |
| primer | | 536 | Forward primer used to amplify BE3 | nucleotide | artificial | |
| | | | target site in HEK293T cells and | | sequence | |
| | | | Sanger sequencing | | | |
| primer | | 537 | Reverse primer used to amplify BE3 | nucleotide | artificial | |
| | | | target site in HEK293T cells for Sanger | | sequence | |
| | | | sequencing | | | |
| primer | | 538 | Forward primer used to amplify | nucleotide | artificial | |
| | | | A0A2KSRDN7-nSpCas9 (D10A)- | | sequence | |
| | | | MG69-1 site 1 in HEK293T cells | | | |
| primer | | 539 | Reverse primer used to amplify | nucleotide | artificial | |
| | | | A0A2K5RDN7-nSpCas9 (D10A)- | | sequence | |
| | | | MG69-1_site 1 in HEK293T cells | | | |
| primer | | 540 | Forward primer used to amplify | nucleotide | artificial | |
| | | | A0A2K5RDN7-nSpCas9 (D10A)- | | sequence | |
| | | | MG69-1 site 2 in HEK293T cells | | | |
| primer | | 541 | Reverse primer used to amplify | nucleotide | artificial | |
| | | | A0A2K5RDN7-nSpCas9 (D10A)- | | sequence | |
| | | | MG69-1 site 2 in HEK293T cells | | | |
| primer | | 542 | Forward primer used to amplify | nucleotide | artificial | |
| | | | A0A2K5RDN7-nSpCas9 (D10A)- | | sequence | |
| | | | MG69-1 site 3 in HEK293T cells | | | |
| primer | | 543 | Reverse primer used to amplify | nucleotide | artificial | |
| | | | A0A2K5RDN7-nSpCas9 (D10A)- | | sequence | |
| | | | MG69-1 site 3 in HEK293T cells | | | |
| primer | | 544 | Forward primer used to amplify | nucleotide | artificial | |
| | | | A0A2K5RDN7-nSpCas9 (D10A)- | | sequence | |
| | | | MG69-1 site 4 in HEK293T cells | | | |
| primer | | 545 | Reverse primer used to amplify | nucleotide | artificial | |
| | | | A0A2KSRDN7-nSpCas9 (D10A)- | | sequence | |
| | | | MG69-1_site 4 in HEK293T cells | | | |
| primer | | 546 | Forward primer used to amplify | nucleotide | artificial | |
| | | | A0A2K5RDN7-nSpCas9 (D10A)- | | sequence | |
| | | | MG69-1_site 5 in HEK293T cells | | | |
| primer | | 547 | Reverse primer used to amplify | nucleotide | artificial | |
| | | | A0A2K5RDN7-nSpCas9 (D10A)- | | sequence | |
| | | | MG69-1_site 5 in HEK293T cells | | | |
| primer | | 548 | Forward primer used to amplify | nucleotide | artificial | |
| | | | A0A2K5RDN7-nMG1-4 (D9A)- | | sequence | |
| | | | MG69-1_site 1 in HEK293T cells | | | |
| primer | | 549 | Reverse primer used to amplify | nucleotide | artificial | |
| | | | A0A2K5RDN7-nMG1-4 (D9A)- | | sequence | |
| | | | MG69-1_site 1 in HEK293T cells | | | |
| primer | | 550 | Forward primer used to amplify | nucleotide | artificial | |
| | | | A0A2K5RDN7-nMG1-4 (D9A)- | | sequence | |
| | | | MG69-1_site 2 in HEK293T cells | | | |
| primer | | 551 | Reverse primer used to amplify | nucleotide | artificial | |
| | | | A0A2K5RDN7-nMG1-4 (D9A)- | | sequence | |
| | | | MG69-1_site 2 in HEK293T cells | | | |
| primer | | 552 | Forward primer used to amplify | nucleotide | artificial | |
| | | | A0A2K5RDN7-nMG1-4 (D9A)- | | sequence | |
| | | | MG69-1_site 3 in HEK293T cells | | | |
| primer | | 553 | Reverse primer used to amplify | nucleotide | artificial | |
| | | | A0A2K5RDN7-nMG1-4 (D9A)- | | sequence | |
| | | | MG69-1_site 3 in HEK293T cells | | | |
| primer | | 554 | Forward primer used to amplify | nucleotide | artificial | |
| | | | A0A2K5RDN7-nMG1-4 (D9A)- | | sequence | |
| | | | MG69-1_site 4 in HEK293T cells | | | |
| primer | | 555 | Reverse primer used to amplify | nucleotide | artificial | |
| | | | A0A2K5RDN7-nMG1-4 (D9A)- | | sequence | |
| | | | MG69-1_site 4 in HEK293T cells | | | |
| primer | | 556 | Forward primer used to amplify | nucleotide | artificial | |
| | | | A0A2K5RDN7-nMG3-6 (D13A)- | | sequence | |
| | | | MG69-1_site 1 in HEK293T cells | | | |
| primer | | 557 | Reverse primer used to amplify | nucleotide | artificial | |
| | | | A0A2K5RDN7-nMG3-6 (D13A)- | | sequence | |
| | | | MG69-1_site 1 in HEK293T cells | | | |
| primer | | 558 | Forward primer used to amplify | nucleotide | artificial | |
| | | | A0A2K5RDN7-nMG3-6 (D13A)- | | sequence | |
| | | | MG69-1_site 2 in HEK293T cells | | | |
| primer | | 559 | Reverse primer used to amplify | nucleotide | artificial | |
| | | | A0A2K5RDN7-nMG3-6 (D13A)- | | sequence | |
| | | | MG69-1_site 2 in HEK293T cells | | | |
| primer | | 560 | Forward primer used to amplify | nucleotide | artificial | |
| | | | A0A2K5RDN7-nMG3-6 (D13A)- | | sequence | |
| | | | MG69-1_site 3 in HEK293T cells | | | |
| primer | | 561 | Reverse primer used to amplify | nucleotide | artificial | |
| | | | A0A2K5RDN7-nMG3-6 (D13A)- | | sequence | |
| | | | MG69-1_site 3 in HEK293T cells | | | |
| primer | | 562 | Forward primer used to amplify | nucleotide | artificial | |
| | | | A0A2K5RDN7-nMG3-6 (D13A)- | | sequence | |
| | | | MG69-1_site 4 in HEK293T cells | | | |
| primer | | 563 | Reverse primer used to amplify | nucleotide | artificial | |
| | | | A0A2K5RDN7-nMG3-6 (D13A)- | | sequence | |
| | | | MG69-1_site 4 in HEK293T cells | | | |
| primer | | 564 | Forward primer used to amplify | nucleotide | artificial | |
| | | | A0A2K5RDN7-nMG3-6 (D13A)- | | sequence | |
| | | | MG69-1_site 5 in HEK293T cells | | | |
| primer | | 565 | Reverse primer used to amplify | nucleotide | artificial | |
| | | | A0A2K5RDN7-nMG3-6 (D13A)- | | sequence | |
| | | | MG69-1_site 5 in HEK293T cells | | | |
| primer | | 566 | Forward primer used to amplify | nucleotide | artificial | |
| | | | A0A2K5RDN7-nMG3-6 (D13A)- | | sequence | |
| | | | MG69-1_site 6 in HEK293T cells | | | |
| primer | | 567 | Reverse primer used to amplify | nucleotide | artificial | |
| | | | A0A2K5RDN7-nMG3-6 (D13 A)- | | sequence | |
| | | | MG69-1_site 6 in HEK293T cells | | | |
| primer | | 568 | Forward primer used to amplify | nucleotide | artificial | |
| | | | A0A2K5RDN7-nMG3-6 (D13A)- | | sequence | |
| | | | MG69-1_site 7 in HEK293T cells | | | |
| primer | | 569 | Reverse primer used to amplify | nucleotide | artificial | |
| | | | A0A2K5RDN7-nMG3-6 (D13A)- | | sequence | |
| | | | MG69-1_site 7 in HEK293T cells | | | |
| primer | | 570 | Forward primer used to amplify | nucleotide | artificial | |
| | | | A0A2K5RDN7-nMG4-2 (D28A)- | | sequence | |
| | | | MG69-1_site 1 in HEK293T cells | | | |
| primer | | 571 | Reverse primer used to amplify | nucleotide | artificial | |
| | | | A0A2K5RDN7-nMG4-2 (D28A)- | | sequence | |
| | | | MG69-1_site 1 in HEK293T cells | | | |
| primer | | 572 | Forward primer used to amplify | nucleotide | artificial | |
| | | | A0A2K5RDN7-nMG4-2 (D28A)- | | sequence | |
| | | | MG69-1_site 2 in HEK293T cells | | | |
| primer | | 573 | Reverse primer used to amplify | nucleotide | artificial | |
| | | | A0A2K5RDN7-nMG4-2 (D28A)- | | sequence | |
| | | | MG69-1_site 2 in HEK293T cells | | | |
| primer | | 574 | Forward primer used to amplify | nucleotide | artificial | |
| | | | A0A2K5RDN7-nMG4-2 (D28A)- | | sequence | |
| | | | MG69-1_site 3 in HEK293T cells | | | |
| primer | | 575 | Reverse primer used to amplify | nucleotide | artificial | |
| | | | A0A2K5RDN7-nMG4-2 (D28A)- | | sequence | |
| | | | MG69-1_site 3 in HEK293T cells | | | |
| primer | | 576 | Forward primer used to amplify | nucleotide | artificial | |
| | | | A0A2K5RDN7-nMG4-2 (D28A)- | | sequence | |
| | | | MG69-1_site 4 in HEK293T cells | | | |
| primer | | 577 | Reverse primer used to amplify | nucleotide | artificial | |
| | | | A0A2K5RDN7-nMG4-2 (D28A)- | | sequence | |
| | | | MG69-1_site 4 in HEK293T cells | | | |
| primer | | 578 | Forward primer used to amplify | nucleotide | artificial | |
| | | | A0A2K5RDN7-nMG18-1 (D12A)- | | sequence | |
| | | | MG69-1_site 1 in HEK293T cells | | | |
| primer | | 579 | Reverse primer used to amplify | nucleotide | artificial | |
| | | | A0A2K5RDN7-nMG18-1 (D12A)- | | sequence | |
| | | | MG69-1_site 1 in HEK293T cells | | | |
| primer | | 580 | Forward primer used to amplify | nucleotide | artificial | |
| | | | A0A2K5RDN7-nMG18-1 (D12A)- | | sequence | |
| | | | MG69-1_site 2 in HEK293T cells | | | |
| primer | | 581 | Reverse primer used to amplify | nucleotide | artificial | |
| | | | A0A2K5RDN7-nMG18-1 (D12A)- | | sequence | |
| | | | MG69-1_site 2 in HEK293T cells | | | |
| primer | | 582 | Forward primer used to amplify | nucleotide | artificial | |
| | | | A0A2KSRDN7-nMG18-1 (D12A)- | | sequence | |
| | | | MG69-1_site 3 in HEK293T cells | | | |
| primer | | 583 | Reverse primer used to amplify | nucleotide | artificial | |
| | | | A0A2K5RDN7-nMG18-1 (D12A)- | | sequence | |
| | | | MG69-1_site 3 in HEK293T cells | | | |
| primer | | 584 | Forward primer used to amplify | nucleotide | artificial | |
| | | | A0A2K5RDN7-nMG18-1 (D12A)- | | sequence | |
| | | | MG69-1_site 4 in HEK293T cells | | | |
| primer | | 585 | Reverse primer used to amplify | nucleotide | artificial | |
| | | | A0A2K5RDN7-nMG18-1 (D12A)- | | sequence | |
| | | | MG69-1_site 4 in HEK293T cells | | | |
| adenine | | 586 | TadA (ABE8.17m)-nMG34-1 (D10A) | protein | artificial | |
| base | | | | | sequence | |
| editor | | | | | | |
| cytosine | | 587 | rAPOBEC1-nMG34-1 (D10A)-UGI | protein | artificial | |
| base | | | (PBS1) | | sequence | |
| editor | | | | | | |
| adenine | | 588 | MG68-3-nSpCas9 (D10A) | protein | artificial | |
| base | | | | | sequence | |
| editor | | | | | | |
| adenine | | 589 | MG68-8-nSpCas9 (D10A) | protein | artificial | |
| base | | | | | sequence | |
| editor | | | | | | |
| Linker | | 590 | | protein | artificial | |
| | | | | | sequence | |
| Linker | | 591 | | protein | artificial | |
| | | | | | sequence | |
| Linker | | 592 | | protein | artificial | |
| | | | | | sequence | |
| Linker | | 593 | | protein | artificial | |
| | | | | | sequence | |
| Cytosine | | 594 | CMP/dCMP-type deaminase domain- | protein | Cebus | unknown |
| Deaminase | | | containing protein (uniprot accession | | imitator | |
| | | | A0A2K5RDN7) | | | |
| Adenosine | | 595 | TadA* (ABE8.17m) | protein | unknown | unknown |
| Deaminase | | | | | | |
| MG34 | | 596 | MG34-1 effector | protein | unknown | uncultivated |
| active | | | | | | organism |
| effectors | | | | | | |
| nickase | | 597 | MG34-1 (D10A) | protein | unknown | uncultivated |
| | | | | | | organism |
| PAM | A598 | | MG34-1 PAM | nucleotide | unknown | NGG |
| MG138 | | 599 | MG138-1 | protein | unknown | Aves Class |
| cytidine | | | | | | |
| deaminase | | | | | | |
| MG138 | | 600 | MG138-2 | protein | unknown | Aves Class |
| cytidine | | | | | | |
| deaminase | | | | | | |
| MG138 | | 601 | MG138-3 | protein | unknown | Aves Class |
| cytidine | | | | | | |
| deaminase | | | | | | |
| MG138 | | 602 | MG138-4 | protein | unknown | Aves Class |
| cytidine | | | | | | |
| deaminase | | | | | | |
| MG138 | | 603 | MG138-5 | protein | unknown | Aves Class |
| cytidine | | | | | | |
| deaminase | | | | | | |
| MG138 | | 604 | MG138-6 | protein | unknown | Aves Class |
| cytidine | | | | | | |
| deaminase | | | | | | |
| MG138 | | 605 | MG138-7 | protein | unknown | Aves Class |
| cytidine | | | | | | |
| deaminase | | | | | | |
| MG138 | | 606 | MG138-8 | protein | unknown | Aves Class |
| cytidine | | | | | | |
| deaminase | | | | | | |
| MG138 | | 607 | MG138-9 | protein | unknown | Aves Class |
| cytidine | | | | | | |
| deaminase | | | | | | |
| MG138 | | 608 | MG138-10 | protein | unknown | Aves Class |
| cytidine | | | | | | |
| deaminase | | | | | | |
| MG138 | | 609 | MG138-11 | protein | unknown | Aves Class |
| cytidine | | | | | | |
| deaminase | | | | | | |
| MG138 | | 610 | MG138-12 | protein | unknown | Aves Class |
| cytidine | | | | | | |
| deaminase | | | | | | |
| MG138 | | 611 | MG138-13 | protein | unknown | Aves Class |
| cytidine | | | | | | |
| deaminase | | | | | | |
| MG138 | | 612 | MG138-14 | protein | unknown | Aves Class |
| cytidine | | | | | | |
| deaminase | | | | | | |
| MG138 | | 613 | MG138-15 | protein | unknown | Aves Class |
| cytidine | | | | | | |
| deaminase | | | | | | |
| MG138 | | 614 | MG138-16 | protein | unknown | Aves Class |
| cytidine | | | | | | |
| deaminase | | | | | | |
| MG138 | | 615 | MG138-17 | protein | unknown | Aves Class |
| cytidine | | | | | | |
| deaminase | | | | | | |
| MG138 | | 616 | MG138-18 | protein | unknown | Aves Class |
| cytidine | | | | | | |
| deaminase | | | | | | |
| MG138 | | 617 | MG138-19 | protein | unknown | Aves Class |
| cytidine | | | | | | |
| deaminase | | | | | | |
| MG138 | | 618 | MG138-20 | protein | unknown | Aves Class |
| cytidine | | | | | | |
| deaminase | | | | | | |
| MG138 | | 619 | MG138-21 | protein | unknown | Aves Class |
| cytidine | | | | | | |
| deaminase | | | | | | |
| MG138 | | 620 | MG138-22 | protein | unknown | Aves Class |
| cytidine | | | | | | |
| deaminase | | | | | | |
| MG138 | | 621 | MG138-23 | protein | unknown | Aves Class |
| cytidine | | | | | | |
| deaminase | | | | | | |
| MG138 | | 622 | MG138-24 | protein | unknown | Aves Class |
| cytidine | | | | | | |
| deaminase | | | | | | |
| MG138 | | 623 | MG138-25 | protein | unknown | Aves Class |
| cytidine | | | | | | |
| deaminase | | | | | | |
| MG138 | | 624 | MG138-26 | protein | unknown | Aves Class |
| cytidine | | | | | | |
| deaminase | | | | | | |
| MG138 | | 625 | MG138-27 | protein | unknown | Aves Class |
| cytidine | | | | | | |
| deaminase | | | | | | |
| MG138 | | 626 | MG138-28 | protein | unknown | Aves Class |
| cytidine | | | | | | |
| deaminase | | | | | | |
| MG138 | | 627 | MG138-29 | protein | unknown | Aves Class |
| cytidine | | | | | | |
| deaminase | | | | | | |
| MG138 | | 628 | MG138-30 | protein | unknown | Aves Class |
| cytidine | | | | | | |
| deaminase | | | | | | |
| MG138 | | 629 | MG138-31 | protein | unknown | Aves Class |
| cytidine | | | | | | |
| deaminase | | | | | | |
| MG138 | | 630 | MG138-32 | protein | unknown | Aves Class |
| cytidine | | | | | | |
| deaminase | | | | | | |
| MG138 | | 631 | MG138-33 | protein | unknown | Aves Class |
| cytidine | | | | | | |
| deaminase | | | | | | |
| MG138 | | 632 | MG138-34 | protein | unknown | Aves Class |
| cytidine | | | | | | |
| deaminase | | | | | | |
| MG138 | | 633 | MG138-35 | protein | unknown | Aves Class |
| cytidine | | | | | | |
| deaminase | | | | | | |
| MG138 | | 634 | MG138-36 | protein | unknown | Aves Class |
| cytidine | | | | | | |
| deaminase | | | | | | |
| MG138 | | 635 | MG138-37 | protein | unknown | Aves Class |
| cytidine | | | | | | |
| deaminase | | | | | | |
| MG138 | | 636 | MG138-38 | protein | unknown | Aves Class |
| cytidine | | | | | | |
| deaminase | | | | | | |
| MG138 | | 637 | MG138-39 | protein | unknown | Aves Class |
| cytidine | | | | | | |
| deaminase | | | | | | |
| MG138 | | 638 | MG138-40 | protein | unknown | Aves Class |
| cytidine | | | | | | |
| deaminase | | | | | | |
| MG139 | | 639 | MG139-1 | protein | unknown | uncultivated |
| cytidine | | | | | | organism |
| deaminase | | | | | | |
| MG139 | | 640 | MG139-2 | protein | unknown | uncultivated |
| cytidine | | | | | | organism |
| deaminase | | | | | | |
| MG139 | | 641 | MG139-3 | protein | unknown | uncultivated |
| cytidine | | | | | | organism |
| deaminase | | | | | | |
| MG139 | | 642 | MG139-4 | protein | unknown | uncultivated |
| cytidine | | | | | | organism |
| deaminase | | | | | | |
| MG139 | | 643 | MG139-5 | protein | unknown | uncultivated |
| cytidine | | | | | | organism |
| deaminase | | | | | | |
| MG139 | | 644 | MG139-6 | protein | unknown | uncultivated |
| cytidine | | | | | | organism |
| deaminase | | | | | | |
| MG139 | | 645 | MG139-7 | protein | unknown | uncultivated |
| cytidine | | | | | | organism |
| deaminase | | | | | | |
| MG139 | | 646 | MG139-8 | protein | unknown | uncultivated |
| cytidine | | | | | | organism |
| deaminase | | | | | | |
| MG139 | | 647 | MG139-9 | protein | unknown | uncultivated |
| cytidine | | | | | | organism |
| deaminase | | | | | | |
| MG139 | | 648 | MG139-10 | protein | unknown | uncultivated |
| cytidine | | | | | | organism |
| deaminase | | | | | | |
| MG139 | | 649 | MG139-11 | protein | unknown | uncultivated |
| cytidine | | | | | | organism |
| deaminase | | | | | | |
| MG139 | | 650 | MG139-12 | protein | unknown | uncultivated |
| cytidine | | | | | | organism |
| deaminase | | | | | | |
| MG139 | | 651 | MG139-13 | protein | unknown | uncultivated |
| cytidine | | | | | | organism |
| deaminase | | | | | | |
| MG139 | | 652 | MG139-14 | protein | unknown | uncultivated |
| cytidine | | | | | | organism |
| deaminase | | | | | | |
| MG139 | | 653 | MG139-15 | protein | unknown | uncultivated |
| cytidine | | | | | | organism |
| deaminase | | | | | | |
| MG139 | | 654 | MG139-16 | protein | unknown | uncultivated |
| cytidine | | | | | | organism |
| deaminase | | | | | | |
| MG139 | | 655 | MG139-17 | protein | unknown | uncultivated |
| cytidine | | | | | | organism |
| deaminase | | | | | | |
| MG139 | | 656 | MG139-18 | protein | unknown | uncultivated |
| cytidine | | | | | | organism |
| deaminase | | | | | | |
| MG139 | | 657 | MG139-19 | protein | unknown | uncultivated |
| cytidine | | | | | | organism |
| deaminase | | | | | | |
| MG139 | | 658 | MG139-20 | protein | unknown | uncultivated |
| cytidine | | | | | | organism |
| deaminase | | | | | | |
| MG139 | | 659 | MG139-21 | protein | unknown | uncultivated |
| cytidine | | | | | | organism |
| deaminase | | | | | | |
| MG141 | | 660 | MG141-1 | protein | unknown | Aves class |
| cytidine | | | | | | |
| deaminase | | | | | | |
| MG141 | | 661 | MG141-2 | protein | unknown | Aves class |
| cytidine | | | | | | |
| deaminase | | | | | | |
| MG141 | | 662 | MG141-3 | protein | unknown | Aves class |
| cytidine | | | | | | |
| deaminase | | | | | | |
| MG142 | | 663 | MG142-1 | protein | unknown | Rodent class |
| cytidine | | | | | | |
| deaminase | | | | | | |
| MG142 | | 664 | MG142-2 | protein | unknown | Rodent class |
| cytidine | | | | | | |
| deaminase | | | | | | |
| MG93 | | 665 | MG93-1 | protein | unknown | Rodent class |
| cytidine | | | | | | |
| deaminase | | | | | | |
| MG93 | | 666 | MG93-2 | protein | unknown | Rodent class |
| cytidine | | | | | | |
| deaminase | | | | | | |
| MG93 | | 667 | MG93-3 | protein | unknown | Rodent class |
| cytidine | | | | | | |
| deaminase | | | | | | |
| MG93 | | 668 | MG93-4 | protein | unknown | Rodent class |
| cytidine | | | | | | |
| deaminase | | | | | | |
| MG93 | | 669 | MG93-5 | protein | unknown | Rodent class |
| cytidine | | | | | | |
| deaminase | | | | | | |
| MG93 | | 670 | MG93-6 | protein | unknown | Rodent class |
| cytidine | | | | | | |
| deaminase | | | | | | |
| MG93 | | 671 | MG93-7 | protein | unknown | Rodent class |
| cytidine | | | | | | |
| deaminase | | | | | | |
| MG93 | | 672 | MG93-8 | protein | unknown | Rodent class |
| cytidine | | | | | | |
| deaminase | | | | | | |
| MG93 | | 673 | MG93-9 | protein | unknown | Rodent class |
| cytidine | | | | | | |
| deaminase | | | | | | |
| MG93 | | 674 | MG93-10 | protein | unknown | Rodent class |
| cytidine | | | | | | |
| deaminase | | | | | | |
| MG93 | | 675 | MG93-11 | protein | unknown | Rodent class |
| cytidine | | | | | | |
| deaminase | | | | | | |
| adenine | | 676 | MG68-4v1-nMG34-1 | Protein | artificial | |
| base | | | | | sequence | |
| editor | | | | | | |
| adenine | | 677 | TadA*(8.8m)-nMG34-1 | Protein | artificial | |
| base | | | | | sequence | |
| editor | | | | | | |
| adenine | | 678 | MG68-4v1-nSpCas9 | Protein | artificial | |
| base | | | | | sequence | |
| editor | | | | | | |
| sgRNA | | 679 | MG34-1 | nucleotide | artificial | |
| scaffold | | | | | sequence | |
| sequence | | | | | | |
| sgRNA | | 680 | SpCas9 | nucleotide | artificial | |
| scaffold | | | | | sequence | |
| sequence | | | | | | |
| spacer | | 681 | Spacer targeting site 1 | nucleotide | artificial | |
| | | | | | sequence | |
| spacer | | 682 | Spacer targeting site 2 | nucleotide | artificial | |
| | | | | | sequence | |
| spacer | | 683 | Spacer targeting site 3 | nucleotide | artificial | |
| | | | | | sequence | |
| spacer | | 684 | Spacer targeting site 4 | nucleotide | artificial | |
| | | | | | sequence | |
| spacer | | 685 | Spacer targeting site 5 | nucleotide | artificial | |
| | | | | | sequence | |
| spacer | | 686 | Spacer targeting site 6 | nucleotide | artificial | |
| | | | | | sequence | |
| spacer | | 687 | Spacer targeting site 7 | nucleotide | artificial | |
| | | | | | sequence | |
| spacer | | 688 | Spacer targeting site 8 | nucleotide | artificial | |
| | | | | | sequence | |
| spacer | | 689 | Spacer targeting site 9 | nucleotide | artificial | |
| | | | | | sequence | |
| primer | | 690 | NGS primer for ABE site 1 | nucleotide | artificial | |
| | | | | | sequence | |
| primer | | 691 | NGS primer for ABE site 1 | nucleotide | artificial | |
| | | | | | sequence | |
| primer | | 692 | NGS primer for ABE site 2 | nucleotide | artificial | |
| | | | | | sequence | |
| primer | | 693 | NGS primer for ABE site 2 | nucleotide | artificial | |
| | | | | | sequence | |
| primer | | 694 | NGS primer for ABE site 3 | nucleotide | artificial | |
| | | | | | sequence | |
| primer | | 695 | NGS primer for ABE site 3 | nucleotide | artificial | |
| | | | | | sequence | |
| primer | | 696 | NGS primer for ABE site 4 | nucleotide | artificial | |
| | | | | | sequence | |
| primer | | 697 | NGS primer for ABE site 4 | nucleotide | artificial | |
| | | | | | sequence | |
| primer | | 698 | NGS primer for ABE site 5 | nucleotide | artificial | |
| | | | | | sequence | |
| primer | | 699 | NGS primer for ABE site 5 | nucleotide | artificial | |
| | | | | | sequence | |
| primer | | 700 | NGS primer for ABE site 6 | nucleotide | artificial | |
| | | | | | sequence | |
| primer | | 701 | NGS primer for ABE site 6 | nucleotide | artificial | |
| | | | | | sequence | |
| primer | | 702 | NGS primer for ABE site 7 | nucleotide | artificial | |
| | | | | | sequence | |
| primer | | 703 | NGS primer for ABE site 7 | nucleotide | artificial | |
| | | | | | sequence | |
| primer | | 704 | NGS primer for ABE site 8 | nucleotide | artificial | |
| | | | | | sequence | |
| primer | | 705 | NGS primer for ABE site 8 | nucleotide | artificial | |
| | | | | | sequence | |
| primer | | 706 | NGS primer for ABE site 9 | nucleotide | artificial | |
| | | | | | sequence | |
| primer | | 707 | NGS primer for ABE site 9 | nucleotide | artificial | |
| | | | | | sequence | |
| BSD | | 708 | Blasticidin engineered sequence for | nucleotide | artificial | |
| resistance | | | selection purposes | | sequence | |
| casette | | | | | | |
| spacer | | 709 | Spacer_MG3-6_g5 | nucleotide | artificial | |
| | | | | | sequence | |
| spacer | | 710 | Spacer_MG3-6_g4 | nucleotide | artificial | |
| | | | | | sequence | |
| spacer | | 711 | Spacer_MG3-6_g3 | nucleotide | artificial | |
| | | | | | sequence | |
| spacer | | 712 | Spacer_MG3-6_g2 | nucleotide | artificial | |
| | | | | | sequence | |
| spacer | | 713 | Spacer_MG3-6_g1 | nucleotide | artificial | |
| | | | | | sequence | |
| spacer | | 714 | Spacer_Cas9_g6 | nucleotide | artificial | |
| | | | | | sequence | |
| spacer | | 715 | Spacer_Cas9_g5 | nucleotide | artificial | |
| | | | | | sequence | |
| spacer | | 716 | Spacer_Cas9_g4 | nucleotide | artificial | |
| | | | | | sequence | |
| spacer | | 717 | Spacer_Cas9_g3 | nucleotide | artificial | |
| | | | | | sequence | |
| spacer | | 718 | Spacer_Cas9_g2 | nucleotide | artificial | |
| | | | | | sequence | |
| spacer | | 719 | Spacer_Cas9_g1 | nucleotide | artificial | |
| | | | | | sequence | |
| plasmid | | 720 | pCMV | nucleotide | artificial | |
| | | | | | sequence | |
| plasmid | | 721 | pCMV-MG68-4v1-nMG34-1 | nucleotide | artificial | |
| | | | | | sequence | |
| plasmid | | 722 | pCMV-TadA*(8.8m)-nMG34-1 | nucleotide | artificial | |
| | | | | | sequence | |
| plasmid | | 723 | pCMV-MG68-4v1-nSpCas9 | nucleotide | artificial | |
| | | | | | sequence | |
| plasmid | | 724 | pCMV-MG68-4v1-nMG34-1_sgRNA | nucleotide | artificial | |
| | | | 1 | | | |
| | | | | | sequence | |
| plasmid | | 725 | pCMV-TadA*(8.8m)-nMG34- | nucleotide | artificial | |
| | | | 1_sgRNA 1 | | | |
| | | | | | sequence | |
| plasmid | | 726 | pCMV-MG68-4v1-nSpCas9_sgRNA 1 | nucleotide | artificial | |
| | | | | | sequence | |
| adenine | | 727 | TadA*(8.17m)-nMG34-1 | Protein | artificial | |
| base | | | | | | |
| editor | | | | | sequence | |
| adenine | | 728 | TadA*(8.17m)-nSpCas9 | Protein | artificial | |
| base | | | | | | |
| editor | | | | | sequence | |
| spacer | | 729 | Spacer 1 for TadA*(8.17m)-nMG34-1 | nucleotide | artificial | |
| | | | targeting in E. coli | | | |
| | | | | | sequence | |
| spacer | | 730 | Spacer 2 for TadA*(8.17m)-nMG34-1 | nucleotide | artificial | |
| | | | targeting in E. coli | | sequence | |
| spacer | | 731 | Spacer 3 for TadA*(8.17m)-nMG34-1 | nucleotide | artificial | |
| | | | targeting in E. coli | | sequence | |
| spacer | | 732 | Spacer 4 for TadA*(8.17m)-nMG34-1 | nucleotide | artificial | |
| | | | targeting in E. coli | | sequence | |
| spacer | | 733 | Spacer 1 for TadA*(8.17m)-nSpCas9 | nucleotide | artificial | |
| | | | targeting in E. coli | | sequence | |
| spacer | | 734 | Spacer 2 for TadA*(8.17m)-nSpCas9 | nucleotide | artificial | |
| | | | targeting in E. coli | | sequence | |
| spacer | | 735 | Spacer 3 for TadA*(8.17m)-nSpCas9 | nucleotide | artificial | |
| | | | targeting in E. coli | | sequence | |
| spacer | | 736 | Spacer 4 for TadA*(8.17m)-nSpCas9 | nucleotide | artificial | |
| | | | targeting in E. coli | | sequence | |
| plasmid | | 737 | pCMV-TadA*(8.17m)-nMG34- | nucleotide | artificial | |
| | | | 1_sgRNA 1 | | sequence | |
| plasmid | | 738 | pCMV-TadA*(8.17m)- | nucleotide | artificial | |
| | | | nSpCas9_sgRNA 1 | | sequence | |
| cytidine | | 739 | rAPOBEC1-nMG34-1-UGI (PBS) | Protein | artificial | |
| base | | | | | sequence | |
| editor | | | | | | |
| cytidine | | 740 | rAPOBEC1-nSpCas9-UGI (PBS) | Protein | artificial | |
| base | | | | | sequence | |
| editor | | | | | | |
| plasmid | | 741 | plasmid, prepared by Twist, that | nucleotide | human | |
| | | | contains the A1CF gene, a cofactor for | | | |
| | | | APOBEC activity on RNA | | | |
| oligonucl | | 742 | RNA Sequence used to test CDAs for | nucleotide | | |
| eotide | | | RNA activity. From Wolfe et. al. NAR | | | |
| | | | Cancer, 2020, Vol. 2, No. 4 | | | |
| oligonucl | | 743 | Labelled primer for poisoned primer | nucleotide | | |
| eotide | | | extension assay used to test CDAs for | | | |
| | | | RNA activity. From Wolfe et. al. NAR | | | |
| | | | Cancer, 2020, Vol. 2, No. 4. 5′ FAM | | | |
| | | | Label | | | |
| MG139 | | 744 | MG139-22 | Protein | Unknown | uncultivated |
| cytidine | | | | | | organism |
| deaminase | | | | | | |
| MG139 | | 745 | MG139-23 | Protein | Unknown | uncultivated |
| cytidine | | | | | | organism |
| deaminase | | | | | | |
| MG139 | | 746 | MG139-24 | Protein | Unknown | uncultivated |
| cytidine | | | | | | organism |
| deaminase | | | | | | |
| MG139 | | 747 | MG139-25 | Protein | Unknown | uncultivated |
| cytidine | | | | | | organism |
| deaminase | | | | | | |
| MG139 | | 748 | MG139-26 | Protein | Unknown | uncultivated |
| cytidine | | | | | | organism |
| deaminase | | | | | | |
| MG139 | | 749 | MG139-27 | Protein | Unknown | uncultivated |
| cytidine | | | | | | organism |
| deaminase | | | | | | |
| MG139 | | 750 | MG139-28 | Protein | Unknown | uncultivated |
| cytidine | | | | | | organism |
| deaminase | | | | | | |
| MG139 | | 751 | MG139-29 | Protein | Unknown | uncultivated |
| cytidine | | | | | | organism |
| deaminase | | | | | | |
| MG139 | | 752 | MG139-30 | Protein | Unknown | uncultivated |
| cytidine | | | | | | organism |
| deaminase | | | | | | |
| MG139 | | 753 | MG139-31 | Protein | Unknown | uncultivated |
| cytidine | | | | | | organism |
| deaminase | | | | | | |
| MG139 | | 754 | MG139-32 | Protein | Unknown | uncultivated |
| cytidine | | | | | | organism |
| deaminase | | | | | | |
| MG139 | | 755 | MG139-33 | Protein | Unknown | uncultivated |
| cytidine | | | | | | organism |
| deaminase | | | | | | |
| MG139 | | 756 | MG139-34 | Protein | Unknown | uncultivated |
| cytidine | | | | | | organism |
| deaminase | | | | | | |
| MG139 | | 757 | MG139-35 | Protein | Unknown | uncultivated |
| cytidine | | | | | | organism |
| deaminase | | | | | | |
| MG139 | | 758 | MG139-36 | Protein | Unknown | uncultivated |
| cytidine | | | | | | organism |
| deaminase | | | | | | |
| MG139 | | 759 | MG139-37 | Protein | Unknown | uncultivated |
| cytidine | | | | | | organism |
| deaminase | | | | | | |
| MG139 | | 760 | MG139-38 | Protein | Unknown | uncultivated |
| cytidine | | | | | | organism |
| deaminase | | | | | | |
| MG139 | | 761 | MG139-39 | Protein | Unknown | uncultivated |
| cytidine | | | | | | organism |
| deaminase | | | | | | |
| MG139 | | 762 | MG139-40 | Protein | Unknown | uncultivated |
| cytidine | | | | | | organism |
| deaminase | | | | | | |
| MG139 | | 763 | MG139-41 | Protein | Unknown | uncultivated |
| cytidine | | | | | | organism |
| deaminase | | | | | | |
| MG139 | | 764 | MG139-42 | Protein | Unknown | uncultivated |
| cytidine | | | | | | organism |
| deaminase | | | | | | |
| MG139 | | 765 | MG139-43 | Protein | Unknown | uncultivated |
| cytidine | | | | | | organism |
| deaminase | | | | | | |
| MG139 | | 766 | MG139-44 | Protein | Unknown | uncultivated |
| cytidine | | | | | | organism |
| deaminase | | | | | | |
| MG139 | | 767 | MG139-45 | Protein | Unknown | uncultivated |
| cytidine | | | | | | organism |
| deaminase | | | | | | |
| MG139 | | 768 | MG139-46 | Protein | Unknown | uncultivated |
| cytidine | | | | | | organism |
| deaminase | | | | | | |
| MG139 | | 769 | MG139-47 | Protein | Unknown | uncultivated |
| cytidine | | | | | | organism |
| deaminase | | | | | | |
| MG139 | | 770 | MG139-48 | Protein | Unknown | uncultivated |
| cytidine | | | | | | organism |
| deaminase | | | | | | |
| MG139 | | 771 | MG139-49 | Protein | Unknown | uncultivated |
| cytidine | | | | | | organism |
| deaminase | | | | | | |
| MG139 | | 772 | MG139-50 | Protein | Unknown | uncultivated |
| cytidine | | | | | | organism |
| deaminase | | | | | | |
| MG139 | | 773 | MG139-51 | Protein | Unknown | uncultivated |
| cytidine | | | | | | organism |
| deaminase | | | | | | |
| MG139 | | 774 | MG139-52 | Protein | Unknown | uncultivated |
| cytidine | | | | | | organism |
| deaminase | | | | | | |
| MG139 | | 775 | MG139-53 | Protein | Unknown | uncultivated |
| cytidine | | | | | | organism |
| deaminase | | | | | | |
| MG139 | | 776 | MG139-54 | Protein | Unknown | uncultivated |
| cytidine | | | | | | organism |
| deaminase | | | | | | |
| MG139 | | 777 | MG139-55 | Protein | Unknown | uncultivated |
| cytidine | | | | | | organism |
| deaminase | | | | | | |
| MG139 | | 778 | MG139-56 | Protein | Unknown | uncultivated |
| cytidine | | | | | | organism |
| deaminase | | | | | | |
| MG139 | | 779 | MG139-57 | Protein | Unknown | uncultivated |
| cytidine | | | | | | organism |
| deaminase | | | | | | |
| MG139 | | 780 | MG139-58 | Protein | Unknown | uncultivated |
| cytidine | | | | | | organism |
| deaminase | | | | | | |
| MG139 | | 781 | MG139-59 | Protein | Unknown | uncultivated |
| cytidine | | | | | | organism |
| deaminase | | | | | | |
| MG139 | | 782 | MG139-60 | Protein | Unknown | uncultivated |
| cytidine | | | | | | organism |
| deaminase | | | | | | |
| MG139 | | 783 | MG139-61 | Protein | Unknown | uncultivated |
| cytidine | | | | | | organism |
| deaminase | | | | | | |
| MG139 | | 784 | MG139-62 | Protein | Unknown | uncultivated |
| cytidine | | | | | | organism |
| deaminase | | | | | | |
| MG139 | | 785 | MG139-63 | Protein | Unknown | uncultivated |
| cytidine | | | | | | organism |
| deaminase | | | | | | |
| MG139 | | 786 | MG139-64 | Protein | Unknown | uncultivated |
| cytidine | | | | | | organism |
| deaminase | | | | | | |
| MG139 | | 787 | MG139-65 | Protein | Unknown | uncultivated |
| cytidine | | | | | | organism |
| deaminase | | | | | | |
| MG139 | | 788 | MG139-66 | Protein | Unknown | uncultivated |
| cytidine | | | | | | organism |
| deaminase | | | | | | |
| MG139 | | 789 | MG139-67 | Protein | Unknown | uncultivated |
| cytidine | | | | | | organism |
| deaminase | | | | | | |
| MG139 | | 790 | MG139-68 | Protein | Unknown | uncultivated |
| cytidine | | | | | | organism |
| deaminase | | | | | | |
| MG139 | | 791 | MG139-69 | Protein | Unknown | uncultivated |
| cytidine | | | | | | organism |
| deaminase | | | | | | |
| MG139 | | 792 | MG139-70 | Protein | Unknown | uncultivated |
| cytidine | | | | | | organism |
| deaminase | | | | | | |
| MG139 | | 793 | MG139-71 | Protein | Unknown | uncultivated |
| cytidine | | | | | | organism |
| deaminase | | | | | | |
| MG139 | | 794 | MG139-72 | Protein | Unknown | uncultivated |
| cytidine | | | | | | organism |
| deaminase | | | | | | |
| MG139 | | 79 | MG139-73 | Protein | Unknown | uncultivated |
| cytidine | | | | | | organism |
| deaminase | | | | | | |
| MG139 | | 796 | MG139-74-1 | Protein | Unknown | uncultivated |
| cytidine | | | | | | organism |
| deaminase | | | | | | |
| MG139 | | 797 | MG139-74-2 | Protein | Unknown | uncultivated |
| cytidine | | | | | | organism |
| deaminase | | | | | | |
| MG139 | | 798 | MG139-75 | Protein | Unknown | uncultivated |
| cytidine | | | | | | organism |
| deaminase | | | | | | |
| MG139 | | 799 | MG139-76 | Protein | Unknown | uncultivated |
| cytidine | | | | | | organism |
| deaminase | | | | | | |
| MG139 | | 800 | MG139-77-1 | Protein | Unknown | uncultivated |
| cytidine | | | | | | organism |
| deaminase | | | | | | |
| MG139 | | 801 | MG139-77-2 | Protein | Unknown | uncultivated |
| cytidine | | | | | | organism |
| deaminase | | | | | | |
| MG139 | | 802 | MG139-78 | Protein | Unknown | uncultivated |
| cytidine | | | | | | organism |
| deaminase | | | | | | |
| MG139 | | 803 | MG139-79 | Protein | Unknown | uncultivated |
| cytidine | | | | | | organism |
| deaminase | | | | | | |
| MG139 | | 804 | MG139-80 | Protein | Unknown | uncultivated |
| cytidine | | | | | | organism |
| deaminase | | | | | | |
| MG139 | | 805 | MG139-81 | Protein | Unknown | uncultivated |
| cytidine | | | | | | organism |
| deaminase | | | | | | |
| MG139 | | 806 | MG139-82 | Protein | Unknown | uncultivated |
| cytidine | | | | | | organism |
| deaminase | | | | | | |
| MG139 | | 80 | MG139-83 | Protein | Unknown | uncultivated |
| cytidine | | | | | | organism |
| deaminase | | | | | | |
| MG139 | | 808 | MG139-84 | Protein | Unknown | uncultivated |
| cytidine | | | | | | organism |
| deaminase | | | | | | |
| MG139 | | 809 | MG139-85 | Protein | Unknown | uncultivated |
| cytidine | | | | | | organism |
| deaminase | | | | | | |
| MG139 | | 810 | MG139-86 | Protein | Unknown | uncultivated |
| cytidine | | | | | | organism |
| deaminase | | | | | | |
| MG139 | | 811 | MG139-87 | Protein | Unknown | uncultivated |
| cytidine | | | | | | organism |
| deaminase | | | | | | |
| MG139 | | 812 | MG139-88 | Protein | Unknown | uncultivated |
| cytidine | | | | | | organism |
| deaminase | | | | | | |
| MG139 | | 813 | MG139-89 | Protein | Unknown | uncultivated |
| cytidine | | | | | | organism |
| deaminase | | | | | | |
| MG139 | | 814 | MG139-90 | Protein | Unknown | uncultivated |
| cytidine | | | | | | organism |
| deaminase | | | | | | |
| MG139 | | 815 | MG139-91 | Protein | Unknown | uncultivated |
| cytidine | | | | | | organism |
| deaminase | | | | | | |
| MG139 | | 816 | MG139-92 | Protein | Unknown | uncultivated |
| cytidine | | | | | | organism |
| deaminase | | | | | | |
| MG139 | | 817 | MG139-93 | Protein | Unknown | uncultivated |
| cytidine | | | | | | organism |
| deaminase | | | | | | |
| MG139 | | 818 | MG139-94 | Protein | Unknown | uncultivated |
| cytidine | | | | | | organism |
| deaminase | | | | | | |
| MG139 | | 819 | MG139-95 | Protein | Unknown | uncultivated |
| cytidine | | | | | | organism |
| deaminase | | | | | | |
| MG139 | | 820 | MG139-96 | Protein | Unknown | uncultivated |
| cytidine | | | | | | organism |
| deaminase | | | | | | |
| MG139 | | 821 | MG139-97 | Protein | Unknown | uncultivated |
| cytidine | | | | | | organism |
| deaminase | | | | | | |
| MG139 | | 822 | MG139-98 | Protein | Unknown | uncultivated |
| cytidine | | | | | | organism |
| deaminase | | | | | | |
| MG139 | | 823 | MG139-99 | Protein | Unknown | uncultivated |
| cytidine | | | | | | organism |
| deaminase | | | | | | |
| MG139 | | 824 | MG139-100 | Protein | Unknown | uncultivated |
| cytidine | | | | | | organism |
| deaminase | | | | | | |
| MG139 | | 825 | MG139-101 | Protein | Unknown | uncultivated |
| cytidine | | | | | | organism |
| deaminase | | | | | | |
| MG139 | | 826 | MG139-102 | Protein | Unknown | uncultivated |
| cytidine | | | | | | organism |
| deaminase | | | | | | |
| MG139 | | 827 | MG139-103 | Protein | Unknown | uncultivated |
| cytidine | | | | | | organism |
| deaminase | | | | | | |
| MG93 | | 828 | MG93-12 | Protein | Unknown | Rodent class |
| cytidine | | | | | | |
| deaminase | | | | | | |
| MG142 | | 829 | MG142-3 | Protein | Unknown | Rodent class |
| Cytidine | | | | | | |
| deaminase | | | | | | |
| MG152 | | 830 | MG152-1 | Protein | Unknown | Bivalvia class |
| cytidine | | | | | | |
| deaminase | | | | | | |
| MG152 | | 831 | MG152-2 | Protein | Unknown | Bivalvia class |
| cytidine | | | | | | |
| deaminase | | | | | | |
| MG152 | | 832 | MG152-3 | Protein | Unknown | Bivalvia class |
| cytidine | | | | | | |
| deaminase | | | | | | |
| MG152 | | 833 | MG152-4 | Protein | Unknown | Bivalvia class |
| cytidine | | | | | | |
| deaminase | | | | | | |
| MG152 | | 834 | MG152-5 | Protein | Unknown | Bivalvia class |
| cytidine | | | | | | |
| deaminase | | | | | | |
| MG152 | | 835 | MG152-6 | Protein | Unknown | Bivalvia class |
| cytidine | | | | | | |
| deaminase | | | | | | |
| adenine | | 836 | MG68-4_r1v1_nMG34-1 | Protein | Artificial | |
| base | | | | | sequence | |
| editor | | | | | | |
| adenine | | 837 | MG68-4_r2v1_nMG34-1 | Protein | Artificial | |
| base | | | | | sequence | |
| editor | | | | | | |
| adenine | | 838 | MG68-4_r2v2_nMG34-1 | Protein | Artificial | |
| base | | | | | sequence | |
| editor | | | | | | |
| adenine | | 839 | MG68-4_r2v3_nMG34-1 | Protein | Artificial | |
| base | | | | | sequence | |
| editor | | | | | | |
| adenine | | 840 | MG68-4_r2v4_nMG34-1 | Protein | Artificial | |
| base | | | | | sequence | |
| editor | | | | | | |
| adenine | | 841 | MG68-4_r2v5_nMG34-1 | Protein | Artificial | |
| base | | | | | sequence | |
| editor | | | | | | |
| adenine | | 842 | MG68-4_r2v6_nMG34-1 | Protein | Artificial | |
| base | | | | | sequence | |
| editor | | | | | | |
| adenine | | 843 | MG68-4_r2v7_nMG34-1 | Protein | Artificial | |
| base | | | | | sequence | |
| editor | | | | | | |
| adenine | | 844 | MG68-4_r2v8_nMG34-1 | Protein | Artificial | |
| base | | | | | sequence | |
| editor | | | | | | |
| adenine | | 845 | MG68-4_r2v9_nMG34-1 | Protein | Artificial | |
| base | | | | | sequence | |
| editor | | | | | | |
| adenine | | 846 | MG68-4_r2v10_nMG34-1 | Protein | Artificial | |
| base | | | | | sequence | |
| editor | | | | | | |
| adenine | | 847 | MG68-4_r2v11_nMG34-1 | Protein | Artificial | |
| base | | | | | sequence | |
| editor | | | | | | |
| adenine | | 848 | MG68-4_r2v12_nMG34-1 | Protein | Artificial | |
| base | | | | | sequence | |
| editor | | | | | | |
| adenine | | 849 | MG68-4_r2v13_nMG34-1 | Protein | Artificial | |
| base | | | | | sequence | |
| editor | | | | | | |
| adenine | | 850 | MG68-4_r2v14_nMG34-1 | Protein | Artificial | |
| base | | | | | sequence | |
| editor | | | | | | |
| adenine | | 851 | MG68-4_r2v15_nMG34-1 | Protein | Artificial | |
| base | | | | | sequence | |
| editor | | | | | | |
| adenine | | 852 | MG68-4_r2v16_nMG34-1 | Protein | Artificial | |
| base | | | | | sequence | |
| editor | | | | | | |
| adenine | | 853 | MG68-4_r2v17_nMG34-1 | Protein | Artificial | |
| base | | | | | sequence | |
| editor | | | | | | |
| adenine | | 854 | MG68-4_r2v18_nMG34-1 | Protein | Artificial | |
| base | | | | | sequence | |
| editor | | | | | | |
| adenine | | 855 | MG68-4_r2v19_nMG34-1 | Protein | Artificial | |
| base | | | | | sequence | |
| editor | | | | | | |
| adenine | | 856 | MG68-4_r2v20_nMG34-1 | Protein | Artificial | |
| base | | | | | sequence | |
| editor | | | | | | |
| adenine | | 857 | MG68-4_r2v21_nMG34-1 | Protein | Artificial | |
| base | | | | | sequence | |
| editor | | | | | | |
| adenine | | 858 | MG68-4_r2v22_nMG34-1 | Protein | Artificial | |
| base | | | | | sequence | |
| editor | | | | | | |
| adenine | | 859 | MG68-4_r2v23_nMG34-1 | Protein | Artificial | |
| base | | | | | sequence | |
| editor | | | | | | |
| adenine | | 860 | MG68-4_r2v24_nMG34-1 | Protein | Artificial | |
| base | | | | | sequence | |
| editor | | | | | | |
| spacer | | 861 | guide 1 for ABE using MG34-1 | nucleotide | Artificial | |
| | | | | | sequence | |
| spacer | | 862 | guide 2 for ABE using MG34-1 | nucleotide | Artificial | |
| | | | | | sequence | |
| spacer | | 863 | guide 3 for ABE using MG34-1 | nucleotide | Artificial | |
| | | | | | sequence | |
| spacer | | 864 | guide 4 for ABE using MG34-1 | nucleotide | Artificial | |
| | | | | | sequence | |
| primer | | 865 | NGS primer for guide 1 of ABE using | nucleotide | Artificial | |
| | | | MG34-1 | | sequence | |
| primer | | 866 | NGS primer for guide 1 of ABE using | nucleotide | Artificial | |
| | | | MG34-1 | | sequence | |
| primer | | 867 | NGS primer for guide 2 of ABE using | nucleotide | Artificial | |
| | | | MG34-1 | | sequence | |
| primer | | 868 | NGS primer for guide 2 of ABE using | nucleotide | Artificial | |
| | | | MG34-1 | | sequence | |
| primer | | 869 | NGS primer for guide 3 of ABE using | nucleotide | Artificial | |
| | | | MG34-1 | | sequence | |
| primer | | 870 | NGS primer for guide 3 of ABE using | nucleotide | Artificial | |
| | | | MG34-1 | | sequence | |
| primer | | 871 | NGS primer for guide 4 of ABE using | nucleotide | Artificial | |
| | | | MG34-1 | | sequence | |
| primer | | 872 | NGS primer for guide 4 of ABE using | nucleotide | Artificial | |
| | | | MG34-1 | | sequence | |
| Plasmid | | 873 | pCMV-MG68-4_rlv1_nMG34-1 | nucleotide | Artificial | |
| | | | | | sequence | |
| Plasmid | | 874 | pCMV-U6p-spacer (guide 1)-MG34-1 | nucleotide | Artificial | |
| | | | sgRNA scaffold | | sequence | |
| Plasmid | | 875 | pAL478 | nucleotide | Artificial | |
| | | | | | sequence | |
| sgRNA | | 876 | MG34-1 | nucleotide | artificial | |
| scaffold | | | | | sequence | |
| sequence | | | | | | |
| Cytosine | | 877 | spCAS9 + MG139-12 + MG69-1 | Protein | Artificial | |
| Base | | | | | sequence | |
| Editor | | | | | | |
| Cytosine | | 878 | spCAS9 + MG93-4 + MG69-1 | Protein | Artificial | |
| Base | | | | | sequence | |
| Editor | | | | | | |
| Cytosine | | 879 | spCAS9 + MG93-3 + MG69-1 | Protein | Artificial | |
| Base | | | | | sequence | |
| Editor | | | | | | |
| Cytosine | | 880 | spCAS9 + MG93-5 + MG69-1 | Protein | Artificial | |
| Base | | | | | sequence | |
| Editor | | | | | | |
| Cytosine | | 881 | spCAS9 + MG93-6 + MG69-1 | Protein | Artificial | |
| Base | | | | | sequence | |
| Editor | | | | | | |
| Cytosine | | 882 | spCAS9 + MG93-7 + MG69-1 | Protein | Artificial | |
| Base | | | | | sequence | |
| Editor | | | | | | |
| Cytosine | | 883 | spCAS9 + MG93-9 + MG69-1 | Protein | Artificial | |
| Base | | | | | sequence | |
| Editor | | | | | | |
| Cytosine | | 884 | spCAS9 + MG93-11 + MG69-1 | Protein | Artificial | |
| Base | | | | | sequence | |
| Editor | | | | | | |
| Cytosine | | 885 | spCAS9 + MG138-17 + MG69-1 | Protein | Artificial | |
| Base | | | | | sequence | |
| Editor | | | | | | |
| Cytosine | | 886 | spCAS9 + MG138-20 + MG69-1 | Protein | Artificial | |
| Base | | | | | sequence | |
| Editor | | | | | | |
| Cytosine | | 887 | spCAS9 + MG138-23 + MG69-1 | Protein | Artificial | |
| Base | | | | | sequence | |
| Editor | | | | | | |
| Cytosine | | 888 | spCAS9 + MG138-32 + MG69-1 | Protein | Artificial | |
| Base | | | | | sequence | |
| Editor | | | | | | |
| Cytosine | | 889 | spCAS9 + MG142-1 + MG69-1 | Protein | Artificial | |
| Base | | | | | sequence | |
| Editor | | | | | | |
| Cytosine | | 890 | MG3-6 + MG139-12 + MG69-1 | Protein | Artificial | |
| Base | | | | | sequence | |
| Editor | | | | | | |
| Cytosine | | 891 | MG3-6 + MG93-4 + MG69-1 | Protein | Artificial | |
| Base | | | | | sequence | |
| Editor | | | | | | |
| Cytosine | | 892 | MG3-6 + MG93-3 + MG69-1 | Protein | Artificial | |
| Base | | | | | sequence | |
| Editor | | | | | | |
| Cytosine | | 893 | MG3-6 + MG93-5 + MG69-1 | Protein | Artificial | |
| Base | | | | | sequence | |
| Editor | | | | | | |
| Cytosine | | 894 | MG3-6 + MG93-6 + MG69-1 | Protein | Artificial | |
| Base | | | | | sequence | |
| Editor | | | | | | |
| Cytosine | | 895 | MG3-6 + MG93-7 + MG69-1 | Protein | Artificial | |
| Base | | | | | sequence | |
| Editor | | | | | | |
| Cytosine | | 896 | MG3-6 + MG93-9 + MG69-1 | Protein | Artificial | |
| Base | | | | | sequence | |
| Editor | | | | | | |
| Cytosine | | 897 | MG3-6 + MG93-11 + MG69-1 | Protein | Artificial | |
| Base | | | | | sequence | |
| Editor | | | | | | |
| Cytosine | | 898 | MG3-6 + MG138-17 + MG69-1 | Protein | Artificial | |
| Base | | | | | sequence | |
| Editor | | | | | | |
| Cytosine | | 899 | MG3-6 + MG138-20 + MG69-1 | Protein | Artificial | |
| Base | | | | | sequence | |
| Editor | | | | | | |
| Cytosine | | 900 | MG3-6 + MG138-23 + MG69-1 | Protein | Artificial | |
| Base | | | | | sequence | |
| Editor | | | | | | |
| Cytosine | | 901 | MG3-6 + MG138-32 + MG69-1 | Protein | Artificial | |
| Base | | | | | sequence | |
| Editor | | | | | | |
| Cytosine | | 902 | MG3-6 + MG142-1 + MG69-1 | Protein | Artificial | |
| Base | | | | | sequence | |
| Editor | | | | | | |
| Cytosine | | 903 | MG34-1 + MG139-12 + MG69-1 | Protein | Artificial | |
| Base | | | | | sequence | |
| Editor | | | | | | |
| Cytosine | | 904 | MG34-1 + MG93-4 + MG69-1 | Protein | Artificial | |
| Base | | | | | sequence | |
| Editor | | | | | | |
| Cytosine | | 905 | MG34-1 + MG93-3 + MG69-1 | Protein | Artificial | |
| Base | | | | | sequence | |
| Editor | | | | | | |
| Cytosine | | 906 | MG34-1 + MG93-5 + MG69-1 | Protein | Artificial | |
| Base | | | | | sequence | |
| Editor | | | | | | |
| Cytosine | | 907 | MG34-1 + MG93-6 + MG69-1 | Protein | Artificial | |
| Base | | | | | sequence | |
| Editor | | | | | | |
| Cytosine | | 908 | MG34-1 + MG93-7 + MG69-1 | Protein | Artificial | |
| Base | | | | | sequence | |
| Editor | | | | | | |
| Cytosine | | 909 | MG34-1 + MG93-9 + MG69-1 | Protein | Artificial | |
| Base | | | | | sequence | |
| Editor | | | | | | |
| Cytosine | | 910 | MG34-1 + MG93-11 + MG69-1 | Protein | Artificial | |
| Base | | | | | sequence | |
| Editor | | | | | | |
| Cytosine | | 911 | MG34-1 + MG138-17 + MG69-1 | Protein | Artificial | |
| Base | | | | | sequence | |
| Editor | | | | | | |
| Cytosine | | 912 | MG34-1 + MG138-20 + MG69-1 | Protein | Artificial | |
| Base | | | | | sequence | |
| Editor | | | | | | |
| Cytosine | | 913 | MG34-1 + MG138-23 + MG69-1 | Protein | Artificial | |
| Base | | | | | sequence | |
| Editor | | | | | | |
| Cytosine | | 914 | MG34-1 + MG138-32 + MG69-1 | Protein | Artificial | |
| Base | | | | | sequence | |
| Editor | | | | | | |
| Cytosine | | 915 | MG34-1 + MG142-1 + MG69-1 | Protein | Artificial | |
| Base | | | | | sequence | |
| Editor | | | | | | |
| Cytosine | | 916 | MG34-1 + A0A2K5RDN7(APOBEC | Protein | Artificial | |
| Base | | | 3A) + MG69-1 | | sequence | |
| Editor | | | | | | |
| sgRNA | | 917 | sgRNA266 | nucleotide | Artificial | |
| (spacer | | | | | sequence | |
| and | | | | | | |
| scaffold) | | | | | | |
| sgRNA | | 918 | sgRNA691 | nucleotide | Artificial | |
| (spacer | | | | | sequence | |
| and | | | | | | |
| scaffold) | | | | | | |
| sgRNA | | 919 | sgRNA692 | nucleotide | Artificial | |
| (spacer | | | | | sequence | |
| and | | | | | | |
| scaffold) | | | | | | |
| sgRNA | | 920 | sgRNA693 | nucleotide | Artificial | |
| (spacer | | | | | sequence | |
| scaffold) | | | | | | |
| sgRNA | | 921 | sgRNA694 | nucleotide | Artificial | |
| (spacer | | | | | sequence | |
| and | | | | | | |
| scaffold) | | | | | | |
| sgRNA | | 922 | sgRNA708 | nucleotide | Artificial | |
| (spacer | | | | | sequence | |
| and | | | | | | |
| scaffold) | | | | | | |
| sgRNA | | 923 | sgRNA709 | nucleotide | Artificial | |
| (spacer | | | | | sequence | |
| and | | | | | | |
| scaffold) | | | | | | |
| sgRNA | | 924 | sgRNA710 | nucleotide | Artificial | |
| (spacer | | | | | sequence | |
| and | | | | | | |
| scaffold) | | | | | | |
| sgRNA | | 925 | sgRNA711 | nucleotide | Artificial | |
| (spacer | | | | | sequence | |
| and | | | | | | |
| scaffold) | | | | | | |
| sgRNA | | 926 | sgRNA712 | nucleotide | Artificial | |
| (spacer | | | | | sequence | |
| and | | | | | | |
| scaffold) | | | | | | |
| sgRNA | | 927 | sgRNA633 | nucleotide | Artificial | |
| (spacer | | | | | sequence | |
| and | | | | | | |
| scaffold) | | | | | | |
| sgRNA | | 928 | sgRNA634 | nucleotide | Artificial | |
| (spacer | | | | | sequence | |
| and | | | | | | |
| scaffold) | | | | | | |
| sgRNA | | 929 | sgRNA635 | nucleotide | Artificial | |
| (spacer | | | | | sequence | |
| and | | | | | | |
| scaffold) | | | | | | |
| sgRNA | | 930 | sgRNA636 | nucleotide | Artificial | |
| (spacer | | | | | sequence | |
| and | | | | | | |
| scaffold) | | | | | | |
| sgRNA | | 931 | sgRNA641 | nucleotide | Artificial | |
| (spacer | | | | | sequence | |
| and | | | | | | |
| scaffold) | | | | | | |
| primer | | 932 | NGS primer for sgRNA266 | nucleotide | Artificial | |
| | | | | | sequence | |
| primer | | 933 | NGS primer for sgRNA266 | nucleotide | Artificial | |
| | | | | | sequence | |
| primer | | 934 | NGS primer for sgRNA691 | nucleotide | Artificial | |
| | | | | | sequence | |
| primer | | 935 | NGS primer for sgRNA691 | nucleotide | Artificial | |
| | | | | | sequence | |
| primer | | 936 | NGS primer for sgRNA692 | nucleotide | Artificial | |
| | | | | | sequence | |
| primer | | 937 | NGS primer for sgRNA692 | nucleotide | Artificial | |
| | | | | | sequence | |
| primer | | 938 | NGS primer for sgRNA693 | nucleotide | Artificial | |
| | | | | | sequence | |
| primer | | 939 | NGS primer for sgRNA693 | nucleotide | Artificial | |
| | | | | | sequence | |
| primer | | 940 | NGS primer for sgRNA694 | nucleotide | Artificial | |
| | | | | | sequence | |
| primer | | 941 | NGS primer for sgRNA694 | nucleotide | Artificial | |
| | | | | | sequence | |
| primer | | 942 | NGS primer for sgRNA708 | nucleotide | Artificial | |
| | | | | | sequence | |
| primer | | 943 | NGS primer for sgRNA708 | nucleotide | Artificial | |
| | | | | | sequence | |
| primer | | 944 | NGS primer for sgRNA709 | nucleotide | Artificial | |
| | | | | | sequence | |
| primer | | 945 | NGS primer for sgRNA709 | nucleotide | Artificial | |
| | | | | | sequence | |
| primer | | 946 | NGS primer for sgRNA710 | nucleotide | Artificial | |
| | | | | | sequence | |
| primer | | 947 | NGS primer for sgRNA710 | nucleotide | Artificial | |
| | | | | | sequence | |
| primer | | 948 | NGS primer for sgRNA711 | nucleotide | Artificial | |
| | | | | | sequence | |
| primer | | 949 | NGS primer for sgRNA711 | nucleotide | Artificial | |
| | | | | | sequence | |
| primer | | 950 | NGS primer for sgRNA712 | nucleotide | Artificial | |
| | | | | | sequence | |
| primer | | 951 | NGS primer for sgRNA712 | nucleotide | Artificial | |
| | | | | | sequence | |
| primer | | 952 | NGS primer for sgRNA633 | nucleotide | Artificial | |
| | | | | | sequence | |
| primer | | 953 | NGS primer for sgRNA633 | nucleotide | Artificial | |
| | | | | | sequence | |
| primer | | 954 | NGS primer for sgRNA634 | nucleotide | Artificial | |
| | | | | | sequence | |
| primer | | 955 | NGS primer for sgRNA634 | nucleotide | Artificial | |
| | | | | | sequence | |
| primer | | 956 | NGS primer for sgRNA635 | nucleotide | Artificial | |
| | | | | | sequence | |
| primer | | 957 | NGS primer for sgRNA635 | nucleotide | Artificial | |
| | | | | | sequence | |
| primer | | 958 | NGS primer for sgRNA636 | nucleotide | Artificial | |
| | | | | | sequence | |
| primer | | 959 | NGS primer for sgRNA636 | nucleotide | Artificial | |
| | | | | | sequence | |
| primer | | 960 | NGS primer for sgRNA641 | nucleotide | Artificial | |
| | | | | | sequence | |
| primer | | 961 | NGS primer for sgRNA641 | nucleotide | Artificial | |
| | | | | | sequence | |
| Engineered | | 962 | Site enginereed in mammalian cell line | nucleotide | Artificial | |
| sequence | | | with 5 PAMs compatible with Cas9 | | sequence | |
| in | | | and MG3-6 editing | | | |
| mammalian | | | | | | |
| cells | | | | | | |
| sgRNA | | 963 | Spacer targeting engineered site #1 | nucleotide | Artificial | |
| | | | | | sequence | |
| sgRNA | | 964 | Spacer targeting engineered site #2 | nucleotide | Artificial | |
| | | | | | sequence | |
| sgRNA | | 965 | Spacer targeting engineered site #3 | nucleotide | Artificial | |
| | | | | | sequence | |
| sgRNA | | 966 | Spacer targeting engineered site #4 | nucleotide | Artificial | |
| | | | | | sequence | |
| sgRNA | | 967 | Spacer targeting engineered site #5 | nucleotide | Artificial | |
| | | | | | sequence | |
| Cytosine | | 968 | spCas9 + A0A2K5RDN7(APOBEC | Protein | Artificial | |
| Base | | | 3A) + MG69-1 | | sequence | |
| Editor | | | | | | |
| Cytosine | | 969 | MG3-6 + A0A2K5RDN7(APOBEC | Protein | Artificial | |
| Base | | | 3A) + MG69-1 | | sequence | |
| Editor | | | | | | |
| MG139 | | 970 | MG139-12 | Protein | Unknown | uncultivated |
| cytidine | | | | | | organism |
| deaminase | | | | | | |
| MG93 | | 971 | MG93-3 | Protein | Unknown | uncultivated |
| cytidine | | | | | | organism |
| deaminase | | | | | | |
| MG93 | | 972 | MG93-4 | Protein | Unknown | uncultivated |
| cytidine | | | | | | organism |
| deaminase | | | | | | |
| MG93 | | 973 | MG93-5 | Protein | Unknown | uncultivated |
| cytidine | | | | | | organism |
| deaminase | | | | | | |
| MG93 | | 974 | MG93-6 | Protein | Unknown | uncultivated |
| cytidine | | | | | | organism |
| deaminase | | | | | | |
| MG93 | | 975 | MG93-7 | Protein | Unknown | uncultivated |
| cytidine | | | | | | organism |
| deaminase | | | | | | |
| MG93 | | 976 | MG93-9 | Protein | Unknown | uncultivated |
| cytidine | | | | | | organism |
| deaminase | | | | | | |
| MG93 | | 977 | MG93-11 | Protein | Unknown | uncultivated |
| cytidine | | | | | | organism |
| deaminase | | | | | | |
| MG138 | | 978 | MG138-17 | Protein | Unknown | uncultivated |
| cytidine | | | | | | organism |
| deaminase | | | | | | |
| MG138 | | 979 | MG138-20 | Protein | Unknown | uncultivated |
| cytidine | | | | | | organism |
| deaminase | | | | | | |
| MG138 | | 980 | MG138-23 | Protein | Unknown | uncultivated |
| cytidine | | | | | | organism |
| deaminase | | | | | | |
| MG138 | | 981 | MG138-32 | Protein | Unknown | uncultivated |
| cytidine | | | | | | organism |
| deaminase | | | | | | |
| MG142 | | 982 | MG142-1 | Protein | Unknown | uncultivated |
| cytidine | | | | | | organism |
| deaminase | | | | | | |
| MG128 | | 983 | MG128-1 Deaminase | Protein | Unknown | Uncultivated |
| Deaminase | | | | | | Organism |
| MG128 | | 984 | MG128-2 Deaminase | Protein | Unknown | Uncultivated |
| Deaminase | | | | | | Organism |
| MG128 | | 985 | MG128-3 Deaminase | Protein | Unknown | Uncultivated |
| Deaminase | | | | | | Organism |
| MG128 | | 986 | MG128-4 Deaminase | Protein | Unknown | Uncultivated |
| Deaminase | | | | | | Organism |
| MG128 | | 987 | MG128-5 Deaminase | Protein | Unknown | Uncultivated |
| Deaminase | | | | | | Organism |
| MG128 | | 988 | MG128-6 Deaminase | Protein | Unknown | Uncultivated |
| Deaminase | | | | | | Organism |
| MG128 | | 989 | MG128-7 Deaminase | Protein | Unknown | Uncultivated |
| Deaminase | | | | | | Organism |
| MG128 | | 990 | MG128-8 Deaminase | Protein | Unknown | Uncultivated |
| Deaminase | | | | | | Organism |
| MG128 | | 991 | MG128-9 Deaminase | Protein | Unknown | Uncultivated |
| Deaminase | | | | | | Organism |
| MG128 | | 992 | MG128-10 Deaminase | Protein | Unknown | Uncultivated |
| Deaminase | | | | | | Organism |
| MG128 | | 993 | MG128-11 Deaminase | Protein | Unknown | Uncultivated |
| Deaminase | | | | | | Organism |
| MG128 | | 994 | MG128-12 Deaminase | Protein | Unknown | Uncultivated |
| Deaminase | | | | | | Organism |
| MG128 | | 995 | MG128-13 Deaminase | Protein | Unknown | Uncultivated |
| Deaminase | | | | | | Organism |
| MG128 | | 996 | MG128-14 Deaminase | Protein | Unknown | Uncultivated |
| Deaminase | | | | | | Organism |
| MG128 | | 997 | MG128-15 Deaminase | Protein | Unknown | Uncultivated |
| Deaminase | | | | | | Organism |
| MG128 | | 998 | MG128-16 Deaminase | Protein | Unknown | Uncultivated |
| Deaminase | | | | | | Organism |
| MG128 | | 999 | MG128-17 Deaminase | Protein | Unknown | Uncultivated |
| Deaminase | | | | | | Organism |
| MG128 | | 1000 | MG128-18 Deaminase | Protein | Unknown | Uncultivated |
| Deaminase | | | | | | Organism |
| MG128 | | 1001 | MG128-19 Deaminase | Protein | Unknown | Uncultivated |
| Deaminase | | | | | | Organism |
| MG128 | | 1002 | MG128-20 Deaminase | Protein | Unknown | Uncultivated |
| Deaminase | | | | | | Organism |
| MG128 | | 1003 | MG128-21 Deaminase | Protein | Unknown | Uncultivated |
| Deaminase | | | | | | Organism |
| MG128 | | 1004 | MG128-22 Deaminase | Protein | Unknown | Uncultivated |
| Deaminase | | | | | | Organism |
| MG128 | | 1005 | MG128-23 Deaminase | Protein | Unknown | Uncultivated |
| Deaminase | | | | | | Organism |
| MG128 | | 1006 | MG128-24 Deaminase | Protein | Unknown | Uncultivated |
| Deaminase | | | | | | Organism |
| MG128 | | 1007 | MG128-25 Deaminase | Protein | Unknown | Uncultivated |
| Deaminase | | | | | | Organism |
| MG128 | | 1008 | MG128-26 Deaminase | Protein | Unknown | Uncultivated |
| Deaminase | | | | | | Organism |
| MG128 | | 1009 | MG128-27 Deaminase | Protein | Unknown | Uncultivated |
| Deaminase | | | | | | Organism |
| MG128 | | 1010 | MG128-28 Deaminase | Protein | Unknown | Uncultivated |
| Deaminase | | | | | | Organism |
| MG128 | | 1011 | MG128-29 Deaminase | Protein | Unknown | Uncultivated |
| Deaminase | | | | | | Organism |
| MG128 | | 1012 | MG128-30 Deaminase | Protein | Unknown | Uncultivated |
| Deaminase | | | | | | Organism |
| MG128 | | 1013 | MG128-31 Deaminase | Protein | Unknown | Uncultivated |
| Deaminase | | | | | | Organism |
| MG128 | | 1014 | MG128-32 Deaminase | Protein | Unknown | Uncultivated |
| Deaminase | | | | | | Organism |
| MG129 | | 1015 | MG129-1 Deaminase | Protein | Unknown | Uncultivated |
| Deaminase | | | | | | Organism |
| MG129 | | 1016 | MG129-2 Deaminase | Protein | Unknown | Uncultivated |
| Deaminase | | | | | | Organism |
| MG129 | | 1017 | MG129-3 Deaminase | Protein | Unknown | Uncultivated |
| Deaminase | | | | | | Organism |
| MG129 | | 1018 | MG129-4 Deaminase | Protein | Unknown | Uncultivated |
| Deaminase | | | | | | Organism |
| MG129 | | 1019 | MG129-5 Deaminase | Protein | Unknown | Uncultivated |
| Deaminase | | | | | | Organism |
| MG129 | | 1020 | MG129-6 Deaminase | Protein | Unknown | Uncultivated |
| Deaminase | | | | | | Organism |
| MG129 | | 1021 | MG129-7 Deaminase | Protein | Unknown | Uncultivated |
| Deaminase | | | | | | Organism |
| MG129 | | 1022 | MG129-8 Deaminase | Protein | Unknown | Uncultivated |
| Deaminase | | | | | | Organism |
| MG129 | | 1023 | MG129-9 Deaminase | Protein | Unknown | Uncultivated |
| Deaminase | | | | | | Organism |
| MG129 | | 1024 | MG129-10 Deaminase | Protein | Unknown | Uncultivated |
| Deaminase | | | | | | Organism |
| MG129 | | 1025 | MG129-11 Deaminase | Protein | Unknown | Uncultivated |
| Deaminase | | | | | | Organism |
| MG129 | | 1026 | MG129-12 Deaminase | Protein | Unknown | Uncultivated |
| Deaminase | | | | | | Organism |
| MG130 | | 1027 | MG130-1 Deaminase | Protein | Unknown | Uncultivated |
| Deaminase | | | | | | Organism |
| MG130 | | 1028 | MG130-2 Deaminase | Protein | Unknown | Uncultivated |
| Deaminase | | | | | | Organism |
| MG130 | | 1029 | MG130-3 Deaminase | Protein | Unknown | Uncultivated |
| Deaminase | | | | | | Organism |
| MG130 | | 1030 | MG130-4 Deaminase | Protein | Unknown | Uncultivated |
| Deaminase | | | | | | Organism |
| MG130 | | 1031 | MG130-5 Deaminase | Protein | Unknown | Uncultivated |
| Deaminase | | | | | | Organism |
| MG131 | | 1032 | MG131-1 Deaminase | Protein | Unknown | Uncultivated |
| Deaminase | | | | | | Organism |
| MG131 | | 1033 | MG131-2 Deaminase | Protein | Unknown | Uncultivated |
| Deaminase | | | | | | Organism |
| MG131 | | 1034 | MG131-3 Deaminase | Protein | Unknown | Uncultivated |
| Deaminase | | | | | | Organism |
| MG131 | | 1035 | MG131-4 Deaminase | Protein | Unknown | Uncultivated |
| Deaminase | | | | | | Organism |
| MG131 | | 1036 | MG131-5 Deaminase | Protein | Unknown | Uncultivated |
| Deaminase | | | | | | Organism |
| MG131 | | 1037 | MG131-6 Deaminase | Protein | Unknown | Uncultivated |
| Deaminase | | | | | | Organism |
| MG131 | | 1038 | MG131-7 Deaminase | Protein | Unknown | Uncultivated |
| Deaminase | | | | | | Organism |
| MG131 | | 1039 | MG131-8 Deaminase | Protein | Unknown | Uncultivated |
| Deaminase | | | | | | Organism |
| MG131 | | 1040 | MG131-9 Deaminase | Protein | Unknown | Uncultivated |
| Deaminase | | | | | | Organism |
| MG132 | | 1041 | MG132-1 Deaminase | Protein | Unknown | Uncultivated |
| Deaminase | | | | | | Organism |
| MG132 | | 1042 | MG132-2 Deaminase | Protein | Unknown | Uncultivated |
| Deaminase | | | | | | Organism |
| MG132 | | 1043 | MG132-3 Deaminase | Protein | Unknown | Uncultivated |
| Deaminase | | | | | | Organism |
| MG133 | | 1044 | MG133-1 Deaminase | Protein | Unknown | Uncultivated |
| Deaminase | | | | | | Organism |
| MG133 | | 1045 | MG133-2 Deaminase | Protein | Unknown | Uncultivated |
| Deaminase | | | | | | Organism |
| MG133 | | 1046 | MG133-3 Deaminase | Protein | Unknown | Uncultivated |
| Deaminase | | | | | | Organism |
| MG133 | | 1047 | MG133-4 Deaminase | Protein | Unknown | Uncultivated |
| Deaminase | | | | | | Organism |
| MG133 | | 1048 | MG133-5 Deaminase | Protein | Unknown | Uncultivated |
| Deaminase | | | | | | Organism |
| MG133 | | 1049 | MG133-6 Deaminase | Protein | Unknown | Uncultivated |
| Deaminase | | | | | | Organism |
| MG133 | | 1050 | MG133-7 Deaminase | Protein | Unknown | Uncultivated |
| Deaminase | | | | | | Organism |
| MG133 | | 1051 | MG133-8 Deaminase | Protein | Unknown | Uncultivated |
| Deaminase | | | | | | Organism |
| MG133 | | 1052 | MG133-9 Deaminase | Protein | Unknown | Uncultivated |
| Deaminase | | | | | | Organism |
| MG133 | | 1053 | MG133-10 Deaminase | Protein | Unknown | Uncultivated |
| Deaminase | | | | | | Organism |
| MG133 | | 1054 | MG133-11 Deaminase | Protein | Unknown | Uncultivated |
| Deaminase | | | | | | Organism |
| MG133 | | 1055 | MG133-12 Deaminase | Protein | Unknown | Uncultivated |
| Deaminase | | | | | | Organism |
| MG133 | | 1056 | MG133-13 Deaminase | Protein | Unknown | Uncultivated |
| Deaminase | | | | | | Organism |
| MG133 | | 1057 | MG133-14 Deaminase | Protein | Unknown | Uncultivated |
| Deaminase | | | | | | Organism |
| MG134 | | 1058 | MG134-1 Deaminase | Protein | Unknown | Uncultivated |
| Deaminase | | | | | | Organism |
| MG134 | | 1059 | MG134-2 Deaminase | Protein | Unknown | Uncultivated |
| Deaminase | | | | | | Organism |
| MG134 | | 1060 | MG134-3 Deaminase | Protein | Unknown | Uncultivated |
| Deaminase | | | | | | Organism |
| MG134 | | 1061 | MG134-4 Deaminase | Protein | Unknown | Uncultivated |
| Deaminase | | | | | | Organism |
| MG135 | | 1062 | MG135-1 Deaminase | Protein | Unknown | Uncultivated |
| Deaminase | | | | | | Organism |
| MG135 | | 1063 | MG135-2 Deaminase | Protein | Unknown | Uncultivated |
| Deaminase | | | | | | Organism |
| MG135 | | 1064 | MG135-3 Deaminase | Protein | Unknown | Uncultivated |
| Deaminase | | | | | | Organism |
| MG135 | | 1065 | MG135-4 Deaminase | Protein | Unknown | Uncultivated |
| Deaminase | | | | | | Organism |
| MG135 | | 1066 | MG135-5 Deaminase | Protein | Unknown | Uncultivated |
| Deaminase | | | | | | Organism |
| MG135 | | 1067 | MG135-6 Deaminase | Protein | Unknown | Uncultivated |
| Deaminase | | | | | | Organism |
| MG135 | | 1068 | MG135-7 Deaminase | Protein | Unknown | Uncultivated |
| Deaminase | | | | | | Organism |
| MG135 | | 1069 | MG135-8 Deaminase | Protein | Unknown | Uncultivated |
| Deaminase | | | | | | Organism |
| MG136 | | 1070 | MG136-1 Deaminase | Protein | Unknown | Uncultivated |
| Deaminase | | | | | | Organism |
| MG136 | | 1071 | MG136-2 Deaminase | Protein | Unknown | Uncultivated |
| Deaminase | | | | | | Organism |
| MG136 | | 1072 | MG136-3 Deaminase | Protein | Unknown | Uncultivated |
| Deaminase | | | | | | Organism |
| MG136 | | 1073 | MG136-4 Deaminase | Protein | Unknown | Uncultivated |
| Deaminase | | | | | | Organism |
| MG136 | | 1074 | MG136-5 Deaminase | Protein | Unknown | Uncultivated |
| Deaminase | | | | | | Organism |
| MG136 | | 1075 | MG136-6 Deaminase | Protein | Unknown | Uncultivated |
| Deaminase | | | | | | Organism |
| MG136 | | 1076 | MG136-7 Deaminase | Protein | Unknown | Uncultivated |
| Deaminase | | | | | | Organism |
| MG136 | | 1077 | MG136-8 Deaminase | Protein | Unknown | Uncultivated |
| Deaminase | | | | | | Organism |
| MG136 | | 1078 | MG136-9 Deaminase | Protein | Unknown | Uncultivated |
| Deaminase | | | | | | Organism |
| MG136 | | 1079 | MG136-10 Deaminase | Protein | Unknown | Uncultivated |
| Deaminase | | | | | | Organism |
| MG136 | | 1080 | MG136-11 Deaminase | Protein | Unknown | Uncultivated |
| Deaminase | | | | | | Organism |
| MG136 | | 1081 | MG136-12 Deaminase | Protein | Unknown | Uncultivated |
| Deaminase | | | | | | Organism |
| MG137 | | 1082 | MG137-1 Deaminase | Protein | Unknown | Uncultivated |
| Deaminase | | | | | | Organism |
| MG137 | | 1083 | MG137-2 Deaminase | Protein | Unknown | Uncultivated |
| Deaminase | | | | | | Organism |
| MG137 | | 1084 | MG137-3 Deaminase | Protein | Unknown | Uncultivated |
| Deaminase | | | | | | Organism |
| MG137 | | 1085 | MG137-4 Deaminase | Protein | Unknown | Uncultivated |
| Deaminase | | | | | | Organism |
| MG137 | | 1086 | MG137-5 Deaminase | Protein | Unknown | Uncultivated |
| Deaminase | | | | | | Organism |
| MG137 | | 1087 | MG137-6 Deaminase | Protein | Unknown | Uncultivated |
| Deaminase | | | | | | Organism |
| MG137 | | 1088 | MG137-7 Deaminase | Protein | Unknown | Uncultivated |
| Deaminase | | | | | | Organism |
| MG137 | | 1089 | MG137-8 Deaminase | Protein | Unknown | Uncultivated |
| Deaminase | | | | | | Organism |
| MG137 | | 1090 | MG137-9 Deaminase | Protein | Unknown | Uncultivated |
| Deaminase | | | | | | Organism |
| MG137 | | 1091 | MG137-10 Deaminase | Protein | Unknown | Uncultivated |
| Deaminase | | | | | | Organism |
| MG137 | | 1092 | MG137-11 Deaminase | Protein | Unknown | Uncultivated |
| Deaminase | | | | | | Organism |
| MG137 | | 1093 | MG137-12 Deaminase | Protein | Unknown | Uncultivated |
| Deaminase | | | | | | Organism |
| MG137 | | 1094 | MG137-13 Deaminase | Protein | Unknown | Uncultivated |
| Deaminase | | | | | | Organism |
| MG137 | | 1095 | MG137-14 Deaminase | Protein | Unknown | Uncultivated |
| Deaminase | | | | | | Organism |
| MG137 | | 1096 | MG137-15 Deaminase | Protein | Unknown | Uncultivated |
| Deaminase | | | | | | Organism |
| MG137 | | 1097 | MG137-16 Deaminase | Protein | Unknown | Uncultivated |
| Deaminase | | | | | | Organism |
| MG137 | | 1098 | MG137-17 Deaminase | Protein | Unknown | Uncultivated |
| Deaminase | | | | | | Organism |
| MG35 | | 1099 | MG35-1 active effectors sgRNA | nucleotide | artificial | N/A |
| active | | | | | sequence | |
| effectors | | | | | | |
| sgRNA | | | | | | |
| MG35 | | 1100 | MG35-2 active effectors sgRNA | nucleotide | artificial | N/A |
| active | | | | | sequence | |
| effectors | | | | | | |
| sgRNA | | | | | | |
| MG35 | | 1101 | MG35-3 active effectors sgRNA | nucleotide | artificial | N/A |
| active | | | | | sequence | |
| effectors | | | | | | |
| sgRNA | | | | | | |
| MG35 | | 1102 | MG35-4 active effectors sgRNA | nucleotide | artificial | N/A |
| active | | | | | sequence | |
| effectors | | | | | | |
| sgRNA | | | | | | |
| MG35 | | 1103 | MG35-5 active effectors sgRNA | nucleotide | artificial | N/A |
| active | | | | | sequence | |
| effectors | | | | | | |
| sgRNA | | | | | | |
| MG35 | | 1104 | MG35-6 active effectors sgRNA | nucleotide | artificial | N/A |
| active | | | | | sequence | |
| effectors | | | | | | |
| sgRNA | | | | | | |
| MG35 | | 1105 | MG35-102 active effectors sgRNA | nucleotide | artificial | N/A |
| active | | | | | sequence | |
| effectors | | | | | | |
| sgRNA | | | | | | |
| MG35 | | 1106 | MG35-1 active effectors PAM | nucleotide | artificial | AnGg |
| active | | | | | sequence | |
| effectors | | | | | | |
| PAM | | | | | | |
| MG35 | A1107 | | MG35-2 active effectors PAM | nucleotide | artificial | nARAA |
| active | | | | | sequence | |
| effectors | | | | | | |
| PAM | | | | | | |
| MG35 | A1108 | | MG35-3 active effectors PAM | nucleotide | artificial | ATGaaa |
| active | | | | | sequence | |
| effectors | | | | | | |
| PAM | | | | | | |
| MG35 | A1109 | | MG35-4 active effectors PAM | nucleotide | artificial | ATGA |
| active | | | | | sequence | |
| effectors | | | | | | |
| PAM | | | | | | |
| MG35 | A1110 | | MG35-5 active effectors PAM | nucleotide | artificial | WTGG |
| active | | | | | sequence | |
| effectors | | | | | | |
| PAM | | | | | | |
| MG35 | A1111 | | MG35-102 active effectors PAM | nucleotide | artificial | RTGA |
| active | | | | | sequence | |
| effectors | | | | | | |
| PAM | | | | | | |
| ABE- | | 1112 | ABE-MG35-1 active adenine base | nucleotide | artificial | N/A |
| MG35 | | | editor gene | | sequence | |
| active | | | | | | |
| adenine | | | | | | |
| base | | | | | | |
| editor | | | | | | |
| genes | | | | | | |
| ABE- | | 1113 | ABE-MG35-1 active adenine base | protein | artificial | N/A |
| MG35 | | | editor | | sequence | |
| active | | | | | | |
| adenine | | | | | | |
| base | | | | | | |
| editors | | | | | | |
| Cas9- | | 1114 | pMG3078 | Nucleotide | | |
| CBE | | | | | | |
| Fam72a | | 1115 | pMG3072 | Nucleotide | | |
| Cas9- | | 1116 | PE266 | Nucleotide | | |
| CBE | | | | | | |
| target | | | | | | |
| site | | | | | | |
| Cas9- | | 1117 | PE691 | Nucleotide | | |
| CBE | | | | | | |
| target | | | | | | |
| site | | | | | | |
| NGS | | 1118 | PE266 NGS Amplicon | Nucleotide | | |
| Amplicon | | | | | | |
| NGS | | 1119 | PE691 NGS Amplicon | Nucleotide | | |
| Amplicon | | | | | | |
| MG35 | | 1120 | MG35-1 active effector amino acid | Polypeptide | | |
| active | | | sequence | | | |
| effector | | | | | | |
| FAM72 | | 1121 | Fam72A peptide sequence | Polypeptide | | |
| A | | | | | | |
| MG35 | | 1122 | MG35-2 active effector amino acid | Polypeptide | | |
| active | | | sequence | | | |
| effector | | | | | | |
| MG35 | | 1123 | MG35-3 active effector amino acid | Polypeptide | | |
| active | | | sequence | | | |
| effector | | | | | | |
| MG35 | | 1124 | MG35-4 active effector amino acid | Polypeptide | | |
| active | | | sequence | | | |
| effector | | | | | | |
| MG35 | | 1125 | MG35-5 active effector amino acid | Polypeptide | | |
| active | | | sequence | | | |
| effector | | | | | | |
| MG35 | | 1126 | MG35-6 active effector amino acid | Polypeptide | | |
| active | | | sequence | | | |
| effector | | | | | | |
| MG35 | | 1127 | MG35-102 active effector amino acid | Polypeptide | | |
| active | | | sequence | | | |
| effector | | | | | | |
| MG3- | | 1128 | 3-68_DIV1_M_RDr1v1_B | Protein | artificial | |
| 6_3-8 | | | | | sequence | |
| adenine | | | | | | |
| base | | | | | | |
| editor | | | | | | |
| MG3- | | 1129 | 3-68_DIV2_M_RDr1v1_B | Protein | artificial | |
| 6_3-8 | | | | | sequence | |
| adenine | | | | | | |
| base | | | | | | |
| editor | | | | | | |
| MG3- | | 1130 | 3-68_DIV3_M_RDr1v1_B | Protein | artificial | |
| 6_3-8 | | | | | sequence | |
| adenine | | | | | | |
| base | | | | | | |
| editor | | | | | | |
| MG3- | | 1131 | 3-68_DIV4_M_RDr1v1_B | Protein | artificial | |
| 6_3-8 | | | | | sequence | |
| adenine | | | | | | |
| base | | | | | | |
| editor | | | | | | |
| MG3- | | 1132 | 3-68_DIV5_M_RDr1v1_B | Protein | artificial | |
| 6_3-8 | | | | | sequence | |
| adenine | | | | | | |
| base | | | | | | |
| editor | | | | | | |
| MG3- | | 1133 | 3-68_DIV6_M_RDr1v1_B | Protein | artificial | |
| 6_3-8 | | | | | sequence | |
| adenine | | | | | | |
| base | | | | | | |
| editor | | | | | | |
| MG3- | | 1134 | 3-68_DIV7_M_RDr1v1_B | Protein | artificial | |
| 6_3-8 | | | | | sequence | |
| adenine | | | | | | |
| base | | | | | | |
| editor | | | | | | |
| MG3- | | 1135 | 3-68_DIV8_M_RDr1v1_B | Protein | artificial | |
| 6_3-8 | | | | | sequence | |
| adenine | | | | | | |
| base | | | | | | |
| editor | | | | | | |
| MG3- | | 1136 | 3-68_DIV9_M_RDr1v1_B | Protein | artificial | |
| 6_3-8 | | | | | sequence | |
| adenine | | | | | | |
| base | | | | | | |
| editor | | | | | | |
| MG3- | | 1137 | 3-68_DIV10_M_RDr1v1_B | Protein | artificial | |
| 6_3-8 | | | | | sequence | |
| adenine | | | | | | |
| base | | | | | | |
| editor | | | | | | |
| MG3- | | 1138 | 3-68_DIV11_M_RDr1v1_B | Protein | artificial | |
| 6_3-8 | | | | | sequence | |
| adenine | | | | | | |
| base | | | | | | |
| editor | | | | | | |
| MG3- | | 1139 | 3-68_DIV12_M_RDr1v1_B | Protein | artificial | |
| 6_3-8 | | | | | sequence | |
| adenine | | | | | | |
| base | | | | | | |
| editor | | | | | | |
| MG3- | | 1140 | 3-68_DIV13_M_RDr1v1_B | Protein | artificial | |
| 6_3-8 | | | | | sequence | |
| adenine | | | | | | |
| base | | | | | | |
| editor | | | | | | |
| MG3- | | 1141 | 3-68_DIV14_M_RDr1v1_B | Protein | artificial | |
| 6_3-8 | | | | | sequence | |
| adenine | | | | | | |
| base | | | | | | |
| editor | | | | | | |
| MG3- | | 1142 | 3-68_DIV15_M_RDr1v1_B | Protein | artificial | |
| 6_3-8 | | | | | sequence | |
| adenine | | | | | | |
| base | | | | | | |
| editor | | | | | | |
| MG3- | | 1143 | 3-68_DIV16_M_RDr1v1_B | Protein | artificial | |
| 6_3-8 | | | | | sequence | |
| adenine | | | | | | |
| base | | | | | | |
| editor | | | | | | |
| MG3- | | 1144 | 3-68_DIV17_M_RDr1v1_B | Protein | artificial | |
| 6_3-8 | | | | | sequence | |
| adenine | | | | | | |
| base | | | | | | |
| editor | | | | | | |
| MG3- | | 1145 | 3-68_DIV18_M_RDr1v1_B | Protein | artificial | |
| 6_3-8 | | | | | sequence | |
| adenine | | | | | | |
| base | | | | | | |
| editor | | | | | | |
| MG3- | | 1146 | 3-68_DIV19_M_RDr1v1_B | Protein | artificial | |
| 6_3-8 | | | | | sequence | |
| adenine | | | | | | |
| base | | | | | | |
| editor | | | | | | |
| MG3- | | 1147 | 3-68_DIV20_M_RDr1v1_B | Protein | artificial | |
| 6_3-8 | | | | | sequence | |
| adenine | | | | | | |
| base | | | | | | |
| editor | | | | | | |
| MG3- | | 1148 | 3-68_DIV21_M_RDr1v1_B | Protein | artificial | |
| 6_3-8 | | | | | sequence | |
| adenine | | | | | | |
| base | | | | | | |
| editor | | | | | | |
| MG3- | | 1149 | 3-68_DIV22_M_RDr1v1_B | Protein | artificial | |
| 6_3-8 | | | | | sequence | |
| adenine | | | | | | |
| base | | | | | | |
| editor | | | | | | |
| MG3- | | 1150 | 3-68_DIV23_M_RDr1v1_B | Protein | artificial | |
| 6_3-8 | | | | | sequence | |
| adenine | | | | | | |
| base | | | | | | |
| editor | | | | | | |
| MG3- | | 1151 | 3-68_DIV24_M_RDr1v1_B | Protein | artificial | |
| 6_3-8 | | | | | sequence | |
| adenine | | | | | | |
| base | | | | | | |
| editor | | | | | | |
| MG3- | | 1152 | 3-68_DIV25_M_RDr1v1_B | Protein | artificial | |
| 6_3-8 | | | | | sequence | |
| adenine | | | | | | |
| base | | | | | | |
| editor | | | | | | |
| MG3- | | 1153 | 3-68_DIV26_M_RDr1v1_B | Protein | artificial | |
| 6_3-8 | | | | | sequence | |
| adenine | | | | | | |
| base | | | | | | |
| editor | | | | | | |
| MG3- | | 1154 | 3-68_DIV27_M_RDr1v1_B | Protein | artificial | |
| 6_3-8 | | | | | sequence | |
| adenine | | | | | | |
| base | | | | | | |
| editor | | | | | | |
| MG3- | | 1155 | 3-68_DIV28_M_RDr1v1_B | Protein | artificial | |
| 6_3-8 | | | | | sequence | |
| adenine | | | | | | |
| base | | | | | | |
| editor | | | | | | |
| MG3- | | 1156 | 3-68_DIV29_M_RDr1v1_B | Protein | artificial | |
| 6_3-8 | | | | | sequence | |
| adenine | | | | | | |
| base | | | | | | |
| editor | | | | | | |
| MG3- | | 1157 | 3-68_DIV30_M_RDr1v1_B | Protein | artificial | |
| 6_3-8 | | | | | sequence | |
| adenine | | | | | | |
| base | | | | | | |
| editor | | | | | | |
| MG3- | | 1158 | 3-68_DIV31_M_RDr1v1_B | Protein | artificial | |
| 6_3-8 | | | | | sequence | |
| adenine | | | | | | |
| base | | | | | | |
| editor | | | | | | |
| MG3- | | 1159 | 3-68_DIV32_M_RDr1v1_B | Protein | artificial | |
| 6_3-8 | | | | | sequence | |
| adenine | | | | | | |
| base | | | | | | |
| editor | | | | | | |
| MG3- | | 1160 | 3-68_DIV33_M_RDr1v1_B | Protein | artificial | |
| 6_3-8 | | | | | sequence | |
| adenine | | | | | | |
| base | | | | | | |
| editor | | | | | | |
| MG34-1 | | 1161 | MG68-4 | Protein | artificial | MG34-1 sequence |
| adenine | | | | | sequence | is included |
| base | | | | | | |
| editor | | | | | | |
| MG34-1 | | 1162 | MGA1.1RD1 | Protein | artificial | MG34-1 sequence |
| adenine | | | | | sequence | is included |
| base | | | | | | |
| editor | | | | | | |
| MG34-1 | | 1163 | MGA1.1RD2 | Protein | artificial | MG34-1 sequence |
| adenine | | | | | sequence | is included |
| base | | | | | | |
| editor | | | | | | |
| MG34-1 | | 1164 | MGA1.1RD3 | Protein | artificial | MG34-1 sequence |
| adenine | | | | | sequence | is included |
| base | | | | | | |
| editor | | | | | | |
| MG34-1 | | 1165 | MGA1.1RD4 | Protein | artificial | MG34-1 sequence |
| adenine | | | | | sequence | is included |
| base | | | | | | |
| editor | | | | | | |
| MG34-1 | | 1166 | MGA1.1RD5 | Protein | artificial | MG34-1 sequence |
| adenine | | | | | sequence | is included |
| base | | | | | | |
| editor | | | | | | |
| MG34-1 | | 1167 | MGA1.1RD6 | Protein | artificial | MG34-1 sequence |
| adenine | | | | | sequence | is included |
| base | | | | | | |
| editor | | | | | | |
| MG34-1 | | 1168 | MGA1.1RD7 | Protein | artificial | MG34-1 sequence |
| adenine | | | | | sequence | is included |
| base | | | | | | |
| editor | | | | | | |
| MG34-1 | | 1169 | MGA1.1RD8 | Protein | artificial | MG34-1 sequence |
| adenine | | | | | sequence | is included |
| base | | | | | | |
| editor | | | | | | |
| MG34-1 | | 1170 | MGA1.1RD9 | Protein | artificial | MG34-1 sequence |
| adenine | | | | | sequence | is included |
| base | | | | | | |
| editor | | | | | | |
| MG34-1 | | 1171 | MGA1.1RD10 | Protein | artificial | MG34-1 sequence |
| adenine | | | | | sequence | is included |
| base | | | | | | |
| editor | | | | | | |
| MG34-1 | | 1172 | MGA1.1RD11 | Protein | artificial | MG34-1 sequence |
| adenine | | | | | sequence | is included |
| base | | | | | | |
| editor | | | | | | |
| MG34-1 | | 1173 | MGA1.1RD12 | Protein | artificial | MG34-1 sequence |
| adenine | | | | | sequence | is included |
| base | | | | | | |
| editor | | | | | | |
| MG34-1 | | 1174 | MGA1.1RD13 | Protein | artificial | MG34-1 sequence |
| adenine | | | | | sequence | is included |
| base | | | | | | |
| editor | | | | | | |
| MG34-1 | | 1175 | MGA1.1RD14 | Protein | artificial | MG34-1 sequence |
| adenine | | | | | sequence | is included |
| base | | | | | | |
| editor | | | | | | |
| MG34-1 | | 1176 | MGA1.1RD15 | Protein | artificial | MG34-1 sequence |
| adenine | | | | | sequence | is included |
| base | | | | | | |
| editor | | | | | | |
| MG34-1 | | 1177 | MGA1.1RD16 | Protein | artificial | MG34-1 sequence |
| adenine | | | | | sequence | is included |
| base | | | | | | |
| editor | | | | | | |
| MG34-1 | | 1178 | MGA1.1RD17 | Protein | artificial | MG34-1 sequence |
| adenine | | | | | sequence | is included |
| base | | | | | | |
| editor | | | | | | |
| MG34-1 | | 1179 | MGA1.1RD18 | Protein | artificial | MG34-1 sequence |
| adenine | | | | | sequence | is included |
| base | | | | | | |
| editor | | | | | | |
| MG34-1 | | 1180 | MGA1.1RD19 | Protein | artificial | MG34-1 sequence |
| adenine | | | | | sequence | is included |
| base | | | | | | |
| editor | | | | | | |
| MG34-1 | | 1181 | MGA1.1RD20 | Protein | artificial | MG34-1 sequence |
| adenine | | | | | sequence | is included |
| base | | | | | | |
| editor | | | | | | |
| MG34-1 | | 1182 | MGA1.1RD21 | Protein | artificial | MG34-1 sequence |
| adenine | | | | | sequence | is included |
| base | | | | | | |
| editor | | | | | | |
| MG34-1 | | 1183 | MGA1.1RD22 | Protein | artificial | MG34-1 sequence |
| adenine | | | | | sequence | is included |
| base | | | | | | |
| editor | | | | | | |
| MG34-1 | | 1184 | MAG0.1_2NLS | Protein | artificial | MG34-1 sequence |
| adenine | | | | | sequence | is included |
| base | | | | | | |
| editor | | | | | | |
| MG34-1 | | 1185 | MAG1.1 2NLS | Protein | artificial | MG34-1 sequence |
| adenine | | | | | sequence | is included |
| base | | | | | | |
| editor | | | | | | |
| MG34-1 | | 1186 | MAG2.1 2NLS | Protein | artificial | MG34-1 sequence |
| adenine | | | | | sequence | is included |
| base | | | | | | |
| editor | | | | | | |
| MG34-1 | | 1187 | guide 2 for ABE using MG34-1 | Nucleotide | artificial | |
| adenine | | | | | sequence | |
| base | | | | | | |
| editor | | | | | | |
| sgRNA6 | | | | | | |
| 8 | | | | | | |
| sequence | | | | | | |
| MG3- | | 1188 | sgRNA68 | Nucleotide | artificial | |
| 6_3-8 | | | | | sequence | |
| adenine | | | | | | |
| base | | | | | | |
| editor | | | | | | |
| sgRNA | | | | | | |
| sequence | | | | | | |
| MG3- | | 1189 | sgRNA46 | Nucleotide | artificial | |
| 6_3-8 | | | | | sequence | |
| adenine | | | | | | |
| base | | | | | | |
| editor | | | | | | |
| sgRNA | | | | | | |
| sequence | | | | | | |
| MG3- | | 1190 | sgRNA49 | Nucleotide | artificial | |
| 6_3-8 | | | | | sequence | |
| adenine | | | | | | |
| base | | | | | | |
| editor | | | | | | |
| sgRNA | | | | | | |
| sequence | | | | | | |
| MG3- | | 1191 | sgRNA51 | Nucleotide | artificial | |
| 6_3-8 | | | | | sequence | |
| adenine | | | | | | |
| base | | | | | | |
| editor | | | | | | |
| sgRNA | | | | | | |
| sequence | | | | | | |
| MG3- | | 1192 | sgRNA53 | Nucleotide | artificial | |
| 6_3-8 | | | | | sequence | |
| adenine | | | | | | |
| base | | | | | | |
| editor | | | | | | |
| sgRNA | | | | | | |
| sequence | | | | | | |
| MG3- | | 1193 | sgRNA54 | Nucleotide | artificial | |
| 6_3-8 | | | | | sequence | |
| adenine | | | | | | |
| base | | | | | | |
| editor | | | | | | |
| sgRNA | | | | | | |
| sequence | | | | | | |
| MG3- | | 1194 | sgRNA55 | Nucleotide | artificial | |
| 6_3-8 | | | | | sequence | |
| adenine | | | | | | |
| base | | | | | | |
| editor | | | | | | |
| sgRNA | | | | | | |
| sequence | | | | | | |
| MG3- | | 1195 | sgRNA62 | Nucleotide | artificial | |
| 6_3-8 | | | | | sequence | |
| adenine | | | | | | |
| base | | | | | | |
| editor | | | | | | |
| sgRNA | | | | | | |
| sequence | | | | | | |
| DNA | | 1196 | guide 2 for ABE using MG34-1 | Nucleotide | artificial | |
| Sequence | | | | | sequence | |
| of Target | | | | | | |
| Site | | | | | | |
| DNA | | 1197 | sgRNA68 | Nucleotide | artificial | |
| Sequence | | | | | sequence | |
| of Target | | | | | | |
| Site | | | | | | |
| DNA | | 1198 | sgRNA46 | Nucleotide | artificial | |
| Sequence | | | | | sequence | |
| of Target | | | | | | |
| Site | | | | | | |
| DNA | | 1199 | sgRNA49 | Nucleotide | artificial | |
| Sequence | | | | | sequence | |
| of Target | | | | | | |
| Site | | | | | | |
| DNA | | 1200 | sgRNA51 | Nucleotide | artificial | |
| Sequence | | | | | sequence | |
| of Target | | | | | | |
| Site | | | | | | |
| DNA | | 1201 | sgRNA53 | Nucleotide | artificial | |
| Sequence | | | | | sequence | |
| of Target | | | | | | |
| Site | | | | | | |
| DNA | | 1202 | sgRNA54 | Nucleotide | artificial | |
| Sequence | | | | | sequence | |
| of Target | | | | | | |
| Site | | | | | | |
| DNA | | 1203 | sgRNA55 | Nucleotide | artificial | |
| Sequence | | | | | sequence | |
| of Target | | | | | | |
| Site | | | | | | |
| DNA | | 1204 | sgRNA62 | Nucleotide | artificial | |
| Sequence | | | | | sequence | |
| of Target | | | | | | |
| Site | | | | | | |
| Plasmid | | 1205 | Expression of MG3-6_3-8 adenine | Nucleotide | artificial | |
| | | | base editor | | sequence | |
| Plasmid | | 1206 | Expression of sgRNA for MG3-6_3-8 | Nucleotide | artificial | |
| | | | adenine base editor | | sequence | |
| Plasmid | | 1207 | Expression of MG34-1 adenine base | Nucleotide | artificial | |
| | | | editor | | sequence | |
| MG93 | | 1208 | W90A | MG93_4v1 | Protein | Rodent class |
| cytidine | | | | | | |
| deaminase | | | | | | |
| variant | | | | | | |
| MG93 | | 1209 | W90F | MG93_4v2 | Protein | Rodent class |
| cytidine | | | | | | |
| deaminase | | | | | | |
| variant | | | | | | |
| MG93 | | 1210 | W90H | MG93_4v3 | Protein | Rodent class |
| cytidine | | | | | | |
| deaminase | | | | | | |
| variant | | | | | | |
| MG93 | | 1211 | W90Y | MG93_4v4 | Protein | Rodent class |
| cytidine | | | | | | |
| deaminase | | | | | | |
| variant | | | | | | |
| MG93 | | 1212 | Y120F | MG93_4v5 | Protein | Rodent class |
| cytidine | | | | | | |
| deaminase | | | | | | |
| variant | | | | | | |
| MG93 | | 1213 | Y120H | MG93_4v6 | Protein | Rodent class |
| cytidine | | | | | | |
| deaminase | | | | | | |
| variant | | | | | | |
| MG93 | | 1214 | Y121F | MG93_4v7 | Protein | Rodent class |
| cytidine | | | | | | |
| deaminase | | | | | | |
| variant | | | | | | |
| MG93 | | 1215 | Y121H | MG93_4v8 | Protein | Rodent class |
| cytidine | | | | | | |
| deaminase | | | | | | |
| variant | | | | | | |
| MG93 | | 1216 | Y121Q | MG93_4v9 | Protein | Rodent class |
| cytidine | | | | | | |
| deaminase | | | | | | |
| variant | | | | | | |
| MG93 | | 1217 | Y121A | MG93_4v10 | Protein | Rodent class |
| cytidine | | | | | | |
| deaminase | | | | | | |
| variant | | | | | | |
| MG93 | | 1218 | Y121D | MG93_4v11 | Protein | Rodent class |
| cytidine | | | | | | |
| deaminase | | | | | | |
| variant | | | | | | |
| MG93 | | 1219 | Y121W | MG93_4v12 | Protein | Rodent class |
| cytidine | | | | | | |
| deaminase | | | | | | |
| variant | | | | | | |
| MG93 | | 1220 | H122Y | MG93_4v13 | Protein | Rodent class |
| cytidine | | | | | | |
| deaminase | | | | | | |
| variant | | | | | | |
| MG93 | | 1221 | H122F | MG93_4v14 | Protein | Rodent class |
| cytidine | | | | | | |
| deaminase | | | | | | |
| variant | | | | | | |
| MG93 | | 1222 | H122I | MG93_4v15 | Protein | Rodent class |
| cytidine | | | | | | |
| deaminase | | | | | | |
| variant | | | | | | |
| MG93 | | 1223 | H122A | MG93_4v16 | Protein | Rodent class |
| cytidine | | | | | | |
| deaminase | | | | | | |
| variant | | | | | | |
| MG93 | | 1224 | H122W | MG93_4v17 | Protein | Rodent class |
| cytidine | | | | | | |
| deaminase | | | | | | |
| variant | | | | | | |
| MG93 | | 1225 | H122D | MG93_4v18 | Protein | Rodent class |
| cytidine | | | | | | |
| deaminase | | | | | | |
| variant | | | | | | |
| MG93 | | 1226 | Replace with hAID loop7 | MG93_4v19 | Protein | Rodent class |
| cytidine | | | | | | |
| deaminase | | | | | | |
| variant | | | | | | |
| MG93 | | 1227 | Replace with 139_86 loop 7 | MG93_4v20 | Protein | Rodent class |
| cytidine | | | | | | |
| deaminase | | | | | | |
| variant | | | | | | |
| MG93 | | 1228 | Truncate from 188 to end | MG93_4v21 | Protein | Rodent class |
| cytidine | | | | | | |
| deaminase | | | | | | |
| variant | | | | | | |
| MG93 | | 1229 | Y121T | MG93_4v22 | Protein | Rodent class |
| cytidine | | | | | | |
| deaminase | | | | | | |
| variant | | | | | | |
| MG93 | | 1230 | Replace with a smaller section of hAID | MG93_4v23 | Protein | Rodent class |
| cytidine | | | loop7 | | | |
| deaminase | | | | | | |
| variant | | | | | | |
| MG93 | | 1231 | Replace with a smaller section of hAID | MG93_4v24 | Protein | Rodent class |
| cytidine | | | loop7 | | | |
| deaminase | | | | | | |
| variant | | | | | | |
| MG93 | | 1232 | R33A | MG93_4v25 | Protein | Rodent class |
| cytidine | | | | | | |
| deaminase | | | | | | |
| variant | | | | | | |
| MG93 | | 1233 | R34A | MG93_4v26 | Protein | Rodent class |
| cytidine | | | | | | |
| deaminase | | | | | | |
| variant | | | | | | |
| MG93 | | 1234 | R34K | MG93_4v27 | Protein | Rodent class |
| cytidine | | | | | | |
| deaminase | | | | | | |
| variant | | | | | | |
| MG93 | | 1235 | H122A R33A | MG93_4v28 | Protein | Rodent class |
| cytidine | | | | | | |
| deaminase | | | | | | |
| variant | | | | | | |
| MG93 | | 1236 | H122A R34A | MG93_4v29 | Protein | Rodent class |
| cytidine | | | | | | |
| deaminase | | | | | | |
| variant | | | | | | |
| MG93 | | 1237 | R52A | MG93_4v30 | Protein | Rodent class |
| cytidine | | | | | | |
| deaminase | | | | | | |
| variant | | | | | | |
| MG93 | | 1238 | H122A R52A | MG93_4v31 | Protein | Rodent class |
| cytidine | | | | | | |
| deaminase | | | | | | |
| variant | | | | | | |
| MG93 | | 1239 | N57G (Shown to have lower off target | MG93_4v32 | Protein | Rodent class |
| cytidine | | | activity in A3A) | | | |
| deaminase | | | | | | |
| variant | | | | | | |
| MG93 | | 1240 | N57G H122A | MG93_4v33 | Protein | Rodent class |
| cytidine | | | | | | |
| deaminase | | | | | | |
| variant | | | | | | |
| MG93 | | 1241 | Replace with A3A loop7 | MG139_86v1 | Protein | Rodent class |
| cytidine | | | | | | |
| deaminase | | | | | | |
| variant | | | | | | |
| MG93 | | 1242 | E123A | MG139_95v1 | Protein | Rodent class |
| cytidine | | | | | | |
| deaminase | | | | | | |
| variant | | | | | | |
| MG93 | | 1243 | E123Q | MG139_95v2 | Protein | Rodent class |
| cytidine | | | | | | |
| deaminase | | | | | | |
| variant | | | | | | |
| MG93 | | 1244 | Replace with hAID loop7 | MG93_3v1 | Protein | Rodent class |
| cytidine | | | | | | |
| deaminase | | | | | | |
| variant | | | | | | |
| MG93 | | 1245 | Replace with 139_86 loop 7 | MG93_3v2 | Protein | Rodent class |
| cytidine | | | | | | |
| deaminase | | | | | | |
| variant | | | | | | |
| MG93 | | 1246 | W127F | MG93_3v3 | Protein | Rodent class |
| cytidine | | | | | | |
| deaminase | | | | | | |
| variant | | | | | | |
| MG93 | | 1247 | W127H | MG93_3v4 | Protein | Rodent class |
| cytidine | | | | | | |
| deaminase | | | | | | |
| variant | | | | | | |
| MG93 | | 1248 | W127Q | MG93_3v5 | Protein | Rodent class |
| cytidine | | | | | | |
| deaminase | | | | | | |
| variant | | | | | | |
| MG93 | | 1249 | W127A | MG93_3v6 | Protein | Rodent class |
| cytidine | | | | | | |
| deaminase | | | | | | |
| variant | | | | | | |
| MG93 | | 1250 | W127D | MG93_3v7 | Protein | Rodent class |
| cytidine | | | | | | |
| deaminase | | | | | | |
| variant | | | | | | |
| MG93 | | 1251 | R39A | MG93_3v8 | Protein | Rodent class |
| cytidine | | | | | | |
| deaminase | | | | | | |
| variant | | | | | | |
| MG93 | | 1252 | K40A | MG93_3v9 | Protein | Rodent class |
| cytidine | | | | | | |
| deaminase | | | | | | |
| variant | | | | | | |
| MG93 | | 1253 | H128A | MG93_3v10 | Protein | Rodent class |
| cytidine | | | | | | |
| deaminase | | | | | | |
| variant | | | | | | |
| MG93 | | 1254 | N63G | MG93_3v11 | Protein | Rodent class |
| cytidine | | | | | | |
| deaminase | | | | | | |
| variant | | | | | | |
| MG93 | | 1255 | R58A | MG93_3v12 | Protein | Rodent class |
| cytidine | | | | | | |
| deaminase | | | | | | |
| variant | | | | | | |
| MG93 | | 1256 | Replace with hAID loop7 | MG93_11v1 | Protein | Rodent class |
| cytidine | | | | | | |
| deaminase | | | | | | |
| variant | | | | | | |
| MG93 | | 1257 | Replace with 139_86 loop 7 | MG93_11v2 | Protein | Rodent class |
| cytidine | | | | | | |
| deaminase | | | | | | |
| variant | | | | | | |
| MG93 | | 1258 | H121F | MG93_11v3 | Protein | Rodent class |
| cytidine | | | | | | |
| deaminase | | | | | | |
| variant | | | | | | |
| MG93 | | 1259 | H121Y | MG93_11v4 | Protein | Rodent class |
| cytidine | | | | | | |
| deaminase | | | | | | |
| variant | | | | | | |
| MG93 | | 1260 | H121Q | MG93_11v5 | Protein | Rodent class |
| cytidine | | | | | | |
| deaminase | | | | | | |
| variant | | | | | | |
| MG93 | | 1261 | H121A | MG93_11v6 | Protein | Rodent class |
| cytidine | | | | | | |
| deaminase | | | | | | |
| variant | | | | | | |
| MG93 | | 1262 | H121D | MG93_11v7 | Protein | Rodent class |
| cytidine | | | | | | |
| deaminase | | | | | | |
| variant | | | | | | |
| MG93 | | 1263 | H121W | MG93_11v8 | Protein | Rodent class |
| cytidine | | | | | | |
| deaminase | | | | | | |
| variant | | | | | | |
| MG93 | | 1264 | N57G (Shown to have lower off target | MG93_11v9 | Protein | Rodent class |
| cytidine | | | activity in A3A) | | | |
| deaminase | | | | | | |
| variant | | | | | | |
| MG93 | | 1265 | R33A | MG93_11v10 | Protein | Rodent class |
| cytidine | | | | | | |
| deaminase | | | | | | |
| variant | | | | | | |
| MG93 | | 1266 | K34A | MG93_11v11 | Protein | Rodent class |
| cytidine | | | | | | |
| deaminase | | | | | | |
| variant | | | | | | |
| MG93 | | 1267 | H122A | MG93_11v12 | Protein | Rodent class |
| cytidine | | | | | | |
| deaminase | | | | | | |
| variant | | | | | | |
| MG93 | | 1268 | H121A | MG93_11v13 | Protein | Rodent class |
| cytidine | | | | | | |
| deaminase | | | | | | |
| variant | | | | | | |
| MG93 | | 1269 | R52A | MG93_11v14 | Protein | Rodent class |
| cytidine | | | | | | |
| deaminase | | | | | | |
| variant | | | | | | |
| MG139 | | 1270 | K16 through P25 of pgtA3H replaces | 139_52v1 | Protein | uncultivated |
| cytidine | | | G20 through P26 | | | organism |
| deaminase | | | | | | |
| variant | | | | | | |
| MG139 | | 1271 | S170 through D138 of pgtA3H | 139_52v2 | Protein | uncultivated |
| cytidine | | | replaces K196 to V215 | | | organism |
| deaminase | | | | | | |
| variant | | | | | | |
| MG139 | | 1272 | P26R | 139_52v3 | Protein | uncultivated |
| cytidine | | | | | | organism |
| deaminase | | | | | | |
| variant | | | | | | |
| MG139 | | 1273 | P26A | 139_52v4 | Protein | uncultivated |
| cytidine | | | | | | organism |
| deaminase | | | | | | |
| variant | | | | | | |
| MG139 | | 1274 | N27R | 139_52v5 | Protein | uncultivated |
| cytidine | | | | | | organism |
| deaminase | | | | | | |
| variant | | | | | | |
| MG139 | | 1275 | N27A | 139_52v6 | Protein | uncultivated |
| cytidine | | | | | | organism |
| deaminase | | | | | | |
| variant | | | | | | |
| MG139 | | 1276 | W44A (equivalent to R52A) | 139_52v7 | Protein | uncultivated |
| cytidine | | | | | | organism |
| deaminase | | | | | | |
| variant | | | | | | |
| MG139 | | 1277 | W45A (equivalent to R52A) | 139_52v8 | Protein | uncultivated |
| cytidine | | | | | | organism |
| deaminase | | | | | | |
| variant | | | | | | |
| MG139 | | 1278 | K49G (equivalent to N57G) | 139_52v9 | Protein | uncultivated |
| cytidine | | | | | | organism |
| deaminase | | | | | | |
| variant | | | | | | |
| MG139 | | 1279 | S50G (equivalent to N57G) | 139_52v10 | Protein | uncultivated |
| cytidine | | | | | | organism |
| deaminase | | | | | | |
| variant | | | | | | |
| MG139 | | 1280 | R51G (equivalent to N57G) | 139_52v11 | Protein | uncultivated |
| cytidine | | | | | | organism |
| deaminase | | | | | | |
| variant | | | | | | |
| MG139 | | 1281 | R121A (equivalent to H121A) | 139_52v12 | Protein | uncultivated |
| cytidine | | | | | | organism |
| deaminase | | | | | | |
| variant | | | | | | |
| MG139 | | 1282 | I122A (equivalent to H122A) | 139_52v13 | Protein | uncultivated |
| cytidine | | | | | | organism |
| deaminase | | | | | | |
| variant | | | | | | |
| MG139 | | 1283 | N123A (equivalent to H122A) | 139_52v14 | Protein | uncultivated |
| cytidine | | | | | | organism |
| deaminase | | | | | | |
| variant | | | | | | |
| MG139 | | 1284 | Y88F (equivalent to W90F) | 139_52v15 | Protein | uncultivated |
| cytidine | | | | | | organism |
| deaminase | | | | | | |
| variant | | | | | | |
| MG139 | | 1285 | Y120F (equivalent to Y120F) | 139_52v16 | Protein | uncultivated |
| cytidine | | | | | | organism |
| deaminase | | | | | | |
| variant | | | | | | |
| MG139 | | 1286 | P22R | 139_86v2 | Protein | uncultivated |
| cytidine | | | | | | organism |
| deaminase | | | | | | |
| variant | | | | | | |
| MG139 | | 1287 | P22A | 139_86v3 | Protein | uncultivated |
| cytidine | | | | | | organism |
| deaminase | | | | | | |
| variant | | | | | | |
| MG139 | | 1288 | K23A | 139_86v4 | Protein | uncultivated |
| cytidine | | | | | | organism |
| deaminase | | | | | | |
| variant | | | | | | |
| MG139 | | 1289 | K41R | 139_86v5 | Protein | uncultivated |
| cytidine | | | | | | organism |
| deaminase | | | | | | |
| variant | | | | | | |
| MG139 | | 1290 | K41A | 139_86v6 | Protein | uncultivated |
| cytidine | | | | | | organism |
| deaminase | | | | | | |
| variant | | | | | | |
| MG139 | | 1291 | truncate K179 and onwards | 139_86v7 | Protein | uncultivated |
| cytidine | | | | | | organism |
| deaminase | | | | | | |
| variant | | | | | | |
| MG139 | | 1292 | Insert hAID loop 7 and truncate K179 | 139_86v8 | Protein | uncultivated |
| cytidine | | | onwards | | | organism |
| deaminase | | | | | | |
| variant | | | | | | |
| MG139 | | 1293 | E54D and truncation | 139_86v9 | Protein | uncultivated |
| cytidine | | | | | | organism |
| deaminase | | | | | | |
| variant | | | | | | |
| MG139 | | 1294 | E54A Mutate catalytic E residue | 139_86v10 | Protein | uncultivated |
| cytidine | | | | | | organism |
| deaminase | | | | | | |
| variant | | | | | | |
| MG139 | | 1295 | Mutate neighboring E residue | 139_86v11 | Protein | uncultivated |
| cytidine | | | | | | organism |
| deaminase | | | | | | |
| variant | | | | | | |
| MG139 | | 1296 | E54AE55A Mutate both catalytic E | 139_86v12 | Protein | uncultivated |
| cytidine | | | residues | | | organism |
| deaminase | | | | | | |
| variant | | | | | | |
| MG152 | | 1297 | K30A | 152_6v1 | Protein | Bivalvia class |
| cytidine | | | | | | |
| deaminase | | | | | | |
| variant | | | | | | |
| MG152 | | 1298 | K30R | 152_6v2 | Protein | Bivalvia class |
| cytidine | | | | | | |
| deaminase | | | | | | |
| variant | | | | | | |
| MG152 | | 1299 | M32A | 152_6v3 | Protein | Bivalvia class |
| cytidine | | | | | | |
| deaminase | | | | | | |
| variant | | | | | | |
| MG152 | | 1300 | M32K | 152_6v4 | Protein | Bivalvia class |
| cytidine | | | | | | |
| deaminase | | | | | | |
| variant | | | | | | |
| MG152 | | 1301 | Y117A | 152_6v5 | Protein | Bivalvia class |
| cytidine | | | | | | |
| deaminase | | | | | | |
| variant | | | | | | |
| MG152 | | 1302 | K118A | 152_6v6 | Protein | Bivalvia class |
| cytidine | | | | | | |
| deaminase | | | | | | |
| variant | | | | | | |
| MG152 | | 1303 | I119A | 152_6v7 | Protein | Bivalvia class |
| cytidine | | | | | | |
| deaminase | | | | | | |
| variant | | | | | | |
| MG152 | | 1304 | I119H | 152_6v8 | Protein | Bivalvia class |
| cytidine | | | | | | |
| deaminase | | | | | | |
| variant | | | | | | |
| MG152 | | 1305 | R120A | 152_6v9 | Protein | Bivalvia class |
| cytidine | | | | | | |
| deaminase | | | | | | |
| variant | | | | | | |
| MG152 | | 1306 | R121A | 152_6v10 | Protein | Bivalvia class |
| cytidine | | | | | | |
| deaminase | | | | | | |
| variant | | | | | | |
| MG152 | | 1307 | P46A | 152_6v11 | Protein | Bivalvia class |
| cytidine | | | | | | |
| deaminase | | | | | | |
| variant | | | | | | |
| MG152 | | 1308 | P46R | 152_6v12 | Protein | Bivalvia class |
| cytidine | | | | | | |
| deaminase | | | | | | |
| variant | | | | | | |
| MG152 | | 1309 | N29A | 152_6v13 | Protein | Bivalvia class |
| cytidine | | | | | | |
| deaminase | | | | | | |
| variant | | | | | | |
| MG152 | | 1310 | Loop 7 from MG138-20 | 152_6v14 | Protein | Bivalvia class |
| cytidine | | | | | | |
| deaminase | | | | | | |
| variant | | | | | | |
| MG152 | | 1311 | Loop 7 from MG139-12 | 152_6v15 | Protein | Bivalvia class |
| cytidine | | | | | | |
| deaminase | | | | | | |
| variant | | | | | | |
| MG138 | | 1312 | R27A | 138_20v1 | Protein | Aves Class |
| cytidine | | | | | | |
| deaminase | | | | | | |
| variant | | | | | | |
| MG138 | | 1313 | N50G | 138_20v2 | Protein | Aves Class |
| cytidine | | | | | | |
| deaminase | | | | | | |
| variant | | | | | | |
| MG139 | | 1314 | Loop 7 from MG138-20 | 139_52v17 | Protein | uncultivated |
| cytidine | | | | | | organism |
| deaminase | | | | | | |
| variant | | | | | | |
| MG139 | | 1315 | Loop 7 from MG139-12 | 139_52v18 | Protein | uncultivated |
| cytidine | | | | | | organism |
| deaminase | | | | | | |
| variant | | | | | | |
| RF148 | | 1316 | | SSDNA | DNA | artificial |
| | | | | substrate | | |
| RF149 | | 1317 | | SSDNA | DNA | artificial |
| | | | | substrate | | |
| RF150 | | 1318 | | SSDNA | DNA | artificial |
| | | | | substrate | | |
| RF151 | | 1319 | | SSDNA | DNA | artificial |
| | | | | substrate | | |
| RF253 | | 1320 | AC vs GC Substrate | Dual | DNA | artificial |
| | | | | DNA | | |
| | | | | substrate | | |
| RF220 | | 1321 | TC v CC substrate | Dual | DNA | artificial |
| | | | | DNA | | |
| | | | | substrate | | |
| 152- | | 1322 | | CDA | Protein | artificial |
| 6_CBE | | | | fused | | |
| | | | | linker, | | |
| | | | | MG3-6, | | |
| | | | | UGI | | |
| | | | | and | | |
| | | | | NLS | | |
| 139- | | 1323 | N27A | CDA | Protein | artificial |
| 52v6_CBE | | | | fused | | |
| | | | | linker, | | |
| | | | | MG3-6, | | |
| | | | | UGI | | |
| | | | | and | | |
| | | | | NLS | | |
| 93- | | 1324 | | CDA | Protein | artificial |
| 4_CBE | | | | fused | | |
| | | | | linker, | | |
| | | | | MG3-6, | | |
| | | | | UGI | | |
| | | | | and | | |
| | | | | NLS | | |
| 139- | | 1325 | | CDA | Protein | artificial |
| 52_CBE | | | | fused | | |
| | | | | linker, | | |
| | | | | MG3-6, | | |
| | | | | UGI | | |
| | | | | and | | |
| | | | | NLS | | |
| 139- | | 1326 | | CDA | Protein | artificial |
| 94_CBE | | | | fused | | |
| | | | | linker | | |
| | | | | MG3-6, | | |
| | | | | UGI | | |
| | | | | and | | |
| | | | | NLS | | |
| 93- | | 1327 | | CDA | Protein | artificial |
| 7_CBE | | | | fused | | |
| | | | | linker, | | |
| | | | | MG3-6, | | |
| | | | | UGI | | |
| | | | | and | | |
| | | | | NLS | | |
| 93- | | 1328 | | CDA | Protein | artificial |
| 3_CBE | | | | fused | | |
| | | | | linker, | | |
| | | | | MG3-6, | | |
| | | | | UGI | | |
| | | | | and | | |
| | | | | NLS | | |
| 139- | | 1329 | | CDA | Protein | artificial |
| 92_CBE | | | | fused | | |
| | | | | linker, | | |
| | | | | MG3-6, | | |
| | | | | UGI | | |
| | | | | and | | |
| | | | | NLS | | |
| 139- | | 1330 | | CDA | Protein | artificial |
| 12_CBE | | | | fused | | |
| | | | | linker, | | |
| | | | | MG3-6, | | |
| | | | | UGI | | |
| | | | | and | | |
| | | | | NLS | | |
| 139- | | 1331 | | CDA | Protein | artificial |
| 103_CBE | | | | fused | | |
| | | | | linker, | | |
| | | | | MG3-6, | | |
| | | | | UGI | | |
| | | | | and | | |
| | | | | NLS | | |
| 139- | | 1332 | | CDA | Protein | artificial |
| 95_CBE | | | | fused | | |
| | | | | linker, | | |
| | | | | MG3-6, | | |
| | | | | UGI | | |
| | | | | and | | |
| | | | | NLS | | |
| 139- | | 1333 | | CDA | Protein | artificial |
| 99_CBE | | | | fused | | |
| | | | | linker, | | |
| | | | | MG3-6, | | |
| | | | | UGI | | |
| | | | | and | | |
| | | | | NLS | | |
| 139- | | 1334 | | CDA | Protein | artificial |
| 90_CBE | | | | fused | | |
| | | | | linker, | | |
| | | | | MG3-6, | | |
| | | | | UGI | | |
| | | | | and | | |
| | | | | NLS | | |
| 139- | | 1335 | | CDA | Protein | artificial |
| 89_CBE | | | | fused | | |
| | | | | linker, | | |
| | | | | MG3-6, | | |
| | | | | UGI | | |
| | | | | and | | |
| | | | | NLS | | |
| 139- | | 1336 | | CDA | Protein | artificial |
| 93_CBE | | | | fused | | |
| | | | | linker, | | |
| | | | | MG3-6, | | |
| | | | | UGI | | |
| | | | | and | | |
| | | | | NLS | | |
| 138- | | 1337 | | CDA | Protein | artificial |
| 30_CBE | | | | fused | | |
| | | | | linker, | | |
| | | | | MG3-6, | | |
| | | | | UGI | | |
| | | | | and | | |
| | | | | NLS | | |
| 139- | | 1338 | | CDA | Protein | artificial |
| 102_CBE | | | | fused | | |
| | | | | linker, | | |
| | | | | MG3-6, | | |
| | | | | UGI | | |
| | | | | and | | |
| | | | | NLS | | |
| 93- | | 1339 | H122A | CDA | Protein | artificial |
| 4v16_CBE | | | | fused | | |
| | | | | linker, | | |
| | | | | MG3-6, | | |
| | | | | UGI | | |
| | | | | and | | |
| | | | | NLS | | |
| 152- | | 1340 | | CDA | Protein | artificial |
| 5_CBE | | | | fused | | |
| | | | | linker, | | |
| | | | | MG3-6, | | |
| | | | | UGI | | |
| | | | | and | | |
| | | | | NLS | | |
| 138- | | 1341 | | CDA | Protein | artificial |
| 20_CBE | | | | fused | | |
| | | | | linker, | | |
| | | | | MG3-6, | | |
| | | | | UGI | | |
| | | | | and | | |
| | | | | NLS | | |
| 138- | | 1342 | | CDA | Protein | artificial |
| 23_CBE | | | | fused | | |
| | | | | linker, | | |
| | | | | MG3-6, | | |
| | | | | UGI | | |
| | | | | and | | |
| | | | | NLS | | |
| 93- | | 1343 | | CDA | Protein | artificial |
| 5_CBE | | | | fused | | |
| | | | | linker, | | |
| | | | | MG3-6, | | |
| | | | | UGI | | |
| | | | | and | | |
| | | | | NLS | | |
| 152- | | 1344 | | CDA | Protein | artificial |
| 4_CBE | | | | fused | | |
| | | | | linker, | | |
| | | | | MG3-6, | | |
| | | | | UGI | | |
| | | | | and | | |
| | | | | NLS | | |
| 152- | | 1345 | | CDA | Protein | artificial |
| 1_CBE | | | | fused | | |
| | | | | linker, | | |
| | | | | MG3-6, | | |
| | | | | UGI | | |
| | | | | and | | |
| | | | | NLS | | |
| 152- | | 1346 | | CDA | Protein | artificial |
| | | | | fused | | |
| | | | | linker, | | |
| | | | | MG3-6, | | |
| 3_CBE | | | | UGI | | |
| | | | | and | | |
| | | | | NLS | | |
| 139- | | 1347 | | CDA | Protein | artificial |
| 56_CBE | | | | fused | | |
| | | | | linker, | | |
| | | | | MG3-6, | | |
| | | | | UGI | | |
| | | | | and | | |
| | | | | NLS | | |
| 93- | | 1348 | | CDA | Protein | artificial |
| 11_CBE | | | | fused | | |
| | | | | linker, | | |
| | | | | MG3-6, | | |
| | | | | UGI | | |
| | | | | and | | |
| | | | | NLS | | |
| 93- | | 1349 | | CDA | Protein | artificial |
| 6_CBE | | | | fused | | |
| | | | | linker, | | |
| | | | | MG3-6, | | |
| | | | | UGI | | |
| | | | | and | | |
| | | | | NLS | | |
| 93- | | 1350 | | CDA | Protein | artificial |
| 9_CBE | | | | fused | | |
| | | | | linker, | | |
| | | | | MG3-6, | | |
| | | | | UGI | | |
| | | | | and | | |
| | | | | NLS | | |
| 142- | | 1351 | | CDA | Protein | artificial |
| 1_CBE | | | | fused | | |
| | | | | linker, | | |
| | | | | MG3-6, | | |
| | | | | UGI | | |
| | | | | and | | |
| | | | | NLS | | |
| 138- | | 1352 | | CDA | Protein | artificial |
| 32_CBE | | | | fused | | |
| | | | | linker, | | |
| | | | | MG3-6, | | |
| | | | | UGI | | |
| | | | | and | | |
| | | | | NLS | | |
| 139- | | 1353 | | CDA | Protein | artificial |
| 101_CBE | | | | fused | | |
| | | | | linker, | | |
| | | | | MG3-6, | | |
| | | | | UGI | | |
| | | | | and | | |
| | | | | NLS | | |
| 138- | | 1354 | | CDA | Protein | artificial |
| 17_CBE | | | | fused | | |
| | | | | linker, | | |
| | | | | MG3-6, | | |
| | | | | UGI | | |
| | | | | and | | |
| | | | | NLS | | |
| 139- | | 1355 | | CDA | Protein | artificial |
| 91_CBE | | | | fused | | |
| | | | | linker, | | |
| | | | | MG3-6, | | |
| | | | | UGI | | |
| | | | | and | | |
| | | | | NLS | | |
| MG34-1 | | 1356 | MG68-4_MG34-1 (D10A) | Protein | artificial | |
| adenine | | | | | sequence | |
| base | | | | | | |
| editor | | | | | | |
| MG34-1 | | 1357 | MG68-4 (D109N)_MG34-1 (D10A) | Protein | artificial | |
| adenine | | | | | sequence | |
| base | | | | | | |
| editor | | | | | | |
| MG34-1 | | 1358 | MG68-4 (D109N homodimer_32aa | Protein | artificial | |
| adenine | | | linker)_MG34-1 (D10A) | | sequence | |
| base | | | | | | |
| editor | | | | | | |
| MG34-1 | | 1359 | MG68-4_(D109N homodimer_52aa | Protein | artificial | |
| adenine | | | linker)_MG34-1 (D10A) | | sequence | |
| base | | | | | | |
| editor | | | | | | |
| MG34-1 | | 1360 | MG68-4_(D109N homodimer_64aa | Protein | artificial | |
| adenine | | | linker)_MG34-1 (D10A) | | sequence | |
| base | | | | | | |
| editor | | | | | | |
| MG34-1 | | 1361 | MG68-4_(D109N homodimer_5aa | Protein | artificial | |
| adenine | | | linker)_MG34-1 (D10A) | | sequence | |
| base | | | | | | |
| editor | | | | | | |
| MG34-1 | | 1362 | TadA*8.8m_MG34-1 (D10A) | Protein | artificial | |
| adenine | | | | | sequence | |
| base | | | | | | |
| editor | | | | | | |
| MG3- | | 1363 | 3-68_DIV30M_CMCL1 | Protein | artificial | |
| 6_3-8 | | | | | sequence | |
| adenine | | | | | | |
| base | | | | | | |
| editor | | | | | | |
| MG3- | | 1364 | 3-68_DIV30M_CMCL2 | Protein | artificial | |
| 6_3-8 | | | | | sequence | |
| adenine | | | | | | |
| base | | | | | | |
| editor | | | | | | |
| MG3- | | 1365 | 3-68_DIV30M_CMCL3 | Protein | artificial | |
| 6_3-8 | | | | | sequence | |
| adenine | | | | | | |
| base | | | | | | |
| editor | | | | | | |
| MG3- | | 1366 | 3-68_DIV30M_CMCL4 | Protein | artificial | |
| 6_3-8 | | | | | sequence | |
| adenine | | | | | | |
| base | | | | | | |
| editor | | | | | | |
| MG3- | | 1367 | 3-68_DIV30M_CMCL5 | Protein | artificial | |
| 6_3-8 | | | | | sequence | |
| adenine | | | | | | |
| base | | | | | | |
| editor | | | | | | |
| MG3- | | 1368 | 3-68_DIV30M_CMCL6 | Protein | artificial | |
| 6_3-8 | | | | | sequence | |
| adenine | | | | | | |
| base | | | | | | |
| editor | | | | | | |
| MG3- | | 1369 | 3-68_DIV30M_CMCL7 | Protein | artificial | |
| 6_3-8 | | | | | sequence | |
| adenine | | | | | | |
| base | | | | | | |
| editor | | | | | | |
| MG3- | | 1370 | 3-68_DIV30M_CMCL9 | Protein | artificial | |
| 6_3-8 | | | | | sequence | |
| adenine | | | | | | |
| base | | | | | | |
| editor | | | | | | |
| MG3- | | 1371 | 3-68_DIV30M_CMCL10 | Protein | artificial | |
| 6_3-8 | | | | | sequence | |
| adenine | | | | | | |
| base | | | | | | |
| editor | | | | | | |
| MG3- | | 1372 | 3-68_DIV30M_CMCL11 | Protein | artificial | |
| 6_3-8 | | | | | sequence | |
| adenine | | | | | | |
| base | | | | | | |
| editor | | | | | | |
| MG3- | | 1373 | 3-68_DIV30M_CMCL12 | Protein | artificial | |
| 6_3-8 | | | | | sequence | |
| adenine | | | | | | |
| base | | | | | | |
| editor | | | | | | |
| MG3- | | 1374 | 3-68_DIV30M_CMCL13 | Protein | artificial | |
| 6_3-8 | | | | | sequence | |
| adenine | | | | | | |
| base | | | | | | |
| editor | | | | | | |
| MG3- | | 1375 | 3-68_DIV30M_CMCL14 | Protein | artificial | |
| 6_3-8 | | | | | sequence | |
| adenine | | | | | | |
| base | | | | | | |
| editor | | | | | | |
| MG3- | | 1376 | 3-68_DIV30M_CMCL15 | Protein | artificial | |
| 6_3-8 | | | | | sequence | |
| adenine | | | | | | |
| base | | | | | | |
| editor | | | | | | |
| MG3- | | 1377 | 3-68_DIV30M_CMCL16 | Protein | artificial | |
| 6_3-8 | | | | | sequence | |
| adenine | | | | | | |
| base | | | | | | |
| editor | | | | | | |
| MG3- | | 1378 | 3-68_DIV30M_CMCL17 | Protein | artificial | |
| 6_3-8 | | | | | sequence | |
| adenine | | | | | | |
| base | | | | | | |
| editor | | | | | | |
| MG3- | | 1379 | 3-68_DIV30M_CMCL18 | Protein | artificial | |
| 6_3-8 | | | | | sequence | |
| adenine | | | | | | |
| base | | | | | | |
| editor | | | | | | |
| MG3- | | 1380 | 3-68_DIV30M_CMCL20 | Protein | artificial | |
| 6_3-8 | | | | | sequence | |
| adenine | | | | | | |
| base | | | | | | |
| editor | | | | | | |
| MG3- | | 1381 | 3-68_DIV30M_CMCL22 | Protein | artificial | |
| 6_3-8 | | | | | sequence | |
| adenine | | | | | | |
| base | | | | | | |
| editor | | | | | | |
| MG3- | | 1382 | 3-68_DIV30M_CMCL23 | Protein | artificial | |
| 6_3-8 | | | | | sequence | |
| adenine | | | | | | |
| base | | | | | | |
| editor | | | | | | |
| MG3- | | 1383 | 3-68_DIV30M_CMCL25 | Protein | artificial | |
| 6_3-8 | | | | | sequence | |
| adenine | | | | | | |
| base | | | | | | |
| editor | | | | | | |
| MG3- | | 1384 | 3-68_DIV30M_CMCL28 | Protein | artificial | |
| 6_3-8 | | | | | sequence | |
| adenine | | | | | | |
| base | | | | | | |
| editor | | | | | | |
| MG3- | | 1385 | 3-68_DIV30M_CMCL29 | Protein | artificial | |
| 6_3-8 | | | | | sequence | |
| adenine | | | | | | |
| base | | | | | | |
| editor | | | | | | |
| MG3- | | 1386 | 3-68_DIV30M_CMCL30 | Protein | artificial | |
| 6_3-8 | | | | | sequence | |
| adenine | | | | | | |
| base | | | | | | |
| editor | | | | | | |
| MG3- | | 1387 | 3-68_DIV30M_CMCL34 | Protein | artificial | |
| 6_3-8 | | | | | sequence | |
| adenine | | | | | | |
| base | | | | | | |
| editor | | | | | | |
| MG3- | | 1388 | 3-68_DIV30M_CMCL35 | Protein | artificial | |
| 6_3-8 | | | | | sequence | |
| adenine | | | | | | |
| base | | | | | | |
| editor | | | | | | |
| MG3- | | 1389 | 3-68_DIV30M_CMCL40 | Protein | artificial | |
| 6_3-8 | | | | | sequence | |
| adenine | | | | | | |
| base | | | | | | |
| editor | | | | | | |
| MG3- | | 1390 | 3-68_DIV30M_CMCL56 | Protein | artificial | |
| 6_3-8 | | | | | sequence | |
| adenine | | | | | | |
| base | | | | | | |
| editor | | | | | | |
| MG3- | | 1391 | 3-68_DIV30M_CMCL57 | Protein | artificial | |
| 6_3-8 | | | | | sequence | |
| adenine | | | | | | |
| base | | | | | | |
| editor | | | | | | |
| MG3- | | 1392 | 3-68_DIV30M_CMCL58 | Protein | artificial | |
| 6_3-8 | | | | | sequence | |
| adenine | | | | | | |
| base | | | | | | |
| editor | | | | | | |
| MG3- | | 1393 | 3-68_DIV30M CMCL59 | Protein | artificial | |
| 6_3-8 | | | | | sequence | |
| adenine | | | | | | |
| base | | | | | | |
| editor | | | | | | |
| MG3- | | 1394 | 3-68_DIV30M_CMCL60 | Protein | artificial | |
| 6_3-8 | | | | | sequence | |
| adenine | | | | | | |
| base | | | | | | |
| editor | | | | | | |
| MG3- | | 1395 | 3-68_DIV30M_CMCL61 | Protein | artificial | |
| 6_3-8 | | | | | sequence | |
| adenine | | | | | | |
| base | | | | | | |
| editor | | | | | | |
| MG3- | | 1396 | 3-68_DIV30M_CMCL62 | Protein | artificial | |
| 6_3-8 | | | | | sequence | |
| adenine | | | | | | |
| base | | | | | | |
| editor | | | | | | |
| MG3- | | 1397 | 3-68_DIV30M_CMCL63 | Protein | artificial | |
| 6_3-8 | | | | | sequence | |
| adenine | | | | | | |
| base | | | | | | |
| editor | | | | | | |
| MG3- | | 1398 | 3-68_DIV30M_CMCL64 | Protein | artificial | |
| 6_3-8 | | | | | sequence | |
| adenine | | | | | | |
| base | | | | | | |
| editor | | | | | | |
| MG3- | | 1399 | 3-68_DIV30M_CMCL65 | Protein | artificial | |
| 6_3-8 | | | | | sequence | |
| adenine | | | | | | |
| base | | | | | | |
| editor | | | | | | |
| MG3- | | 1400 | 3-68_DIV30M_CMCL66 | Protein | artificial | |
| 6_3-8 | | | | | sequence | |
| adenine | | | | | | |
| base | | | | | | |
| editor | | | | | | |
| MG3- | | 1401 | 3-68_DIV30M_CMCL67 | Protein | artificial | |
| 6_3-8 | | | | | sequence | |
| adenine | | | | | | |
| base | | | | | | |
| editor | | | | | | |
| MG3- | | 1402 | 3-68_DIV30M_CMCL68 | Protein | artificial | |
| 6_3-8 | | | | | sequence | |
| adenine | | | | | | |
| base | | | | | | |
| editor | | | | | | |
| MG3- | | 1403 | 3-68_DIV30M_CMCL69 | Protein | artificial | |
| 6_3-8 | | | | | sequence | |
| adenine | | | | | | |
| base | | | | | | |
| editor | | | | | | |
| MG3- | | 1404 | 3-68_DIV30M_CMCL70 | Protein | artificial | |
| 6_3-8 | | | | | sequence | |
| adenine | | | | | | |
| base | | | | | | |
| editor | | | | | | |
| MG3- | | 1405 | 3-68_DIV30M_CMCL71 | Protein | artificial | |
| 6_3-8 | | | | | sequence | |
| adenine | | | | | | |
| base | | | | | | |
| editor | | | | | | |
| MG3- | | 1406 | 3-68_DIV30M_CMCL72 | Protein | artificial | |
| 6_3-8 | | | | | sequence | |
| adenine | | | | | | |
| base | | | | | | |
| editor | | | | | | |
| MG3- | | 1407 | 3-68_DIV30M_CMCL73 | Protein | artificial | |
| 6_3-8 | | | | | sequence | |
| adenine | | | | | | |
| base | | | | | | |
| editor | | | | | | |
| MG3- | | 1408 | 3-68_DIV30M_CMCL74 | Protein | artificial | |
| 6_3-8 | | | | | sequence | |
| adenine | | | | | | |
| base | | | | | | |
| editor | | | | | | |
| MG3- | | 1409 | 3-68_DIV30M_CMCL75 | Protein | artificial | |
| 6_3-8 | | | | | sequence | |
| adenine | | | | | | |
| base | | | | | | |
| editor | | | | | | |
| MG3- | | 1410 | 3-68_DIV30M | Protein | artificial | |
| 6_3-8 | | | | | sequence | |
| adenine | | | | | | |
| base | | | | | | |
| editor | | | | | | |
| MG3- | | 1411 | 3-68_DIV30D | Protein | artificial | |
| 6_3-8 | | | | | sequence | |
| adenine | | | | | | |
| base | | | | | | |
| editor | | | | | | |
| MG3- | | 1412 | 3-68_DIV30_M_EPMG68- | Protein | artificial | |
| 6_3-8 | | | 4_D7G_D10G_B | | sequence | |
| adenine | | | | | | |
| base | | | | | | |
| editor | | | | | | |
| MG3- | | 1413 | 3-68_DIV30_M_EPMG68- | Protein | artificial | |
| 6_3-8 | | | 4_H129N_B | | sequence | |
| adenine | | | | | | |
| base | | | | | | |
| editor | | | | | | |
| MG3- | | 1414 | 3-68_DIV30_HT_EPMG68- | Protein | artificial | |
| 6_3-8 | | | 4_D109N + D7G-D10G_B | | sequence | |
| adenine | | | | | | |
| base | | | | | | |
| editor | | | | | | |
| MG3- | | 1415 | 3-68_DIV30_HT_EPMG68- | Protein | artificial | |
| 6_3-8 | | | 4_D109N + H129N B | | sequence | |
| adenine | | | | | | |
| base | | | | | | |
| editor | | | | | | |
| MG34-1 | | 1416 | MG34-1_633 guide | Nucleotide | artificial | |
| adenine | | | | | sequence | |
| base | | | | | | |
| editor | | | | | | |
| sgRNA | | | | | | |
| sequence | | | | | | |
| MG34-1 | | 1417 | MG34-1_634 guide | Nucleotide | artificial | |
| adenine | | | | | sequence | |
| base | | | | | | |
| editor | | | | | | |
| sgRNA | | | | | | |
| sequence | | | | | | |
| MG3- | | 1418 | sgRNA68 | Nucleotide | artificial | |
| 6_3-8 | | | | | sequence | |
| adenine | | | | | | |
| base | | | | | | |
| editor | | | | | | |
| sgRNA | | | | | | |
| sequence | | | | | | |
| MG34-1 | | 1419 | MG34-1_633 target sequence | Nucleotide | artificial | |
| adenine | | | | | sequence | |
| base | | | | | | |
| editor | | | | | | |
| target | | | | | | |
| sequence | | | | | | |
| MG34-1 | | 1420 | MG34-1_634 target sequence | Nucleotide | artificial | |
| adenine | | | | | sequence | |
| base | | | | | | |
| editor | | | | | | |
| target | | | | | | |
| sequence | | | | | | |
| MG3- | | 1421 | sgRNA68 target sequence | Nucleotide | artificial | |
| 6_3-8 | | | | | sequence | |
| adenine | | | | | | |
| base | | | | | | |
| editor | | | | | | |
| target | | | | | | |
| sequence | | | | | | |
| Plasmid | | 1422 | Expression of MG34-1 adenine base | Nucleotide | artificial | |
| | | | editor, pPE798 | | sequence | |
| Plasmid | | 1423 | Expression of MG3-6_3-8 adenine | Nucleotide | artificial | |
| | | | base editor, pPE1159 | | sequence | |
| MG35-1 | | 1424 | MG35-1 ABE | Protein | artificial | |
| adenine | | | | | sequence | |
| base | | | | | | |
| editor | | | | | | |
| Plasmid, | | 1425 | Expression of MG35-1 ABE and | Nucleotide | artificial | |
| MG35-1 | | | sgRNA targeting the CAT gene | | sequence | |
| adenine | | | | | | |
| base | | | | | | |
| editor | | | | | | |
| construct | | | | | | |
| with | | | | | | |
| sgRNA | | | | | | |
| and CAT | | | | | | |
| gene | | | | | | |
| Plasmid, | | 1426 | Expression of MG35-1 ABE and | Nucleotide | artificial | |
| MG35-1 | | | sgRNA with a scrabled spacer that | | sequence | |
| adenine | | | cannot target the CAT gene | | | |
| base | | | | | | |
| editor | | | | | | |
| construct | | | | | | |
| with | | | | | | |
| sgRNA | | | | | | |
| and CAT | | | | | | |
| gene | | | | | | |
| MG35-1 | | 1427 | MG35-1 sgRNA with spacer targeting | Nucleotide | artificial | |
| sgRNA | | | CAT gene | | sequence | |
| MG35-1 | | 1428 | MG35-1 sgRNA with scrambled | Nucleotide | artificial | |
| sgRNA | | | version of spacer targeting CAT gene | | sequence | |
| MG35-1 | | 1429 | MG35-1 CAT gene target sequence | Nucleotide | artificial | |
| target | | | | | sequence | |
| sequence | | | | | | |
| MG35-1 | | 1430 | MG35-1 CAT gene scrambled target | Nucleotide | artificial | |
| target | | | sequence | | sequence | |
| sequence | | | | | | |
| MG3- | | 1431 | MG3-6/3-8 mApoa1 BE F12 | | N.A. | |
| 6/3-8 | | | | | | |
| APOA1 | | | | | | |
| sgRNA | | | | | | |
| MG3- | | 1432 | MG3-6/3-8 mApoa1 BE D11 | | N.A. | |
| 6/3-8 | | | | | | |
| APOA1 | | | | | | |
| sgRNA | | | | | | |
| MG3- | | 1433 | MG3-6/3-8 mApoa1 BE C5 | | N.A. | |
| 6/3-8 | | | | | | |
| APOA1 | | | | | | |
| sgRNA | | | | | | |
| MG3- | | 1434 | MG3-6/3-8 mApoa1 BE A4 | | N.A. | |
| 6/3-8 | | | | | | |
| APOA1 | | | | | | |
| sgRNA | | | | | | |
| MG3- | | 1435 | MG3-6/3-8 mApoa1 BE F4 | | N.A. | |
| 6/3-8 | | | | | | |
| APOA1 | | | | | | |
| sgRNA | | | | | | |
| MG3- | | 1436 | MG3-6/3-8 mApoa1 BE A5 | | N.A. | |
| 6/3-8 | | | | | | |
| APOA1 | | | | | | |
| sgRNA | | | | | | |
| MG3- | | 1437 | MG3-6/3-8 mApoa1 BE E12 | | N.A. | |
| 6/3-8 | | | | | | |
| APOA1 | | | | | | |
| sgRNA | | | | | | |
| MG3- | | 1438 | MG3-6/3-8 mApoa1 BE A11 | | N.A. | |
| 6/3-8 | | | | | | |
| APOA1 | | | | | | |
| sgRNA | | | | | | |
| MG3- | | 1439 | MG3-6/3-8 mApoa1 BE B4 | | N.A. | |
| 6/3-8 | | | | | | |
| APOA1 | | | | | | |
| sgRNA | | | | | | |
| MG3- | | 1440 | MG3-6/3-8 mApoa1 BE G4 | | N.A. | |
| 6/3-8 | | | | | | |
| APOA1 | | | | | | |
| sgRNA | | | | | | |
| MG3- | | 1441 | MG3-6/3-8 mApoa1 BE B2 | | N.A. | |
| 6/3-8 | | | | | | |
| APOA1 | | | | | | |
| sgRNA | | | | | | |
| MG3- | | 1442 | MG3-6/3-8 mApoa1 BE D7 | | N.A. | |
| 6/3-8 | | | | | | |
| APOA1 | | | | | | |
| sgRNA | | | | | | |
| MG3- | | 1443 | MG3-6/3-8 mApoa1 BE B5 | | N.A. | |
| 6/3-8 | | | | | | |
| APOA1 | | | | | | |
| sgRNA | | | | | | |
| MG3- | | 1444 | MG3-6/3-8 mApoa1 BE G6 | | N.A. | |
| 6/3-8 | | | | | | |
| APOA1 | | | | | | |
| sgRNA | | | | | | |
| MG3- | | 1445 | MG3-6/3-8 mApoa1 BE A8 | | N.A. | |
| 6/3-8 | | | | | | |
| APOA1 | | | | | | |
| sgRNA | | | | | | |
| MG3- | | 1446 | MG3-6/3-8 mApoa1 BE F2 | | N.A. | |
| 6/3-8 | | | | | | |
| APOA1 | | | | | | |
| sgRNA | | | | | | |
| MG3- | | 1447 | MG3-6/3-8 mApoa1 BE E1 | | N.A. | |
| 6/3-8 | | | | | | |
| APOA1 | | | | | | |
| sgRNA | | | | | | |
| MG3- | | 1448 | MG3-6/3-8 mApoa1 BE B8 | | N.A. | |
| 6/3-8 | | | | | | |
| APOA1 | | | | | | |
| sgRNA | | | | | | |
| MG3- | | 1449 | MG3-6/3-8 mApoa1 BE H8 | | N.A. | |
| 6/3-8 | | | | | | |
| APOA1 | | | | | | |
| sgRNA | | | | | | |
| MG3- | | 1450 | MG3-6/3-8 mApoa1 BE H6 | | N.A. | |
| 6/3-8 | | | | | | |
| APOA1 | | | | | | |
| sgRNA | | | | | | |
| MG3- | | 1451 | MG3-6/3-8 mApoa1 BE F5 | | N.A. | |
| 6/3-8 | | | | | | |
| APOA1 | | | | | | |
| sgRNA | | | | | | |
| MG3- | | 1452 | MG3-6/3-8 mApoa1 BE H3 | | N.A. | |
| 6/3-8 | | | | | | |
| APOA1 | | | | | | |
| sgRNA | | | | | | |
| MG3- | | 1453 | MG3-6/3-8 mApoa1 BE H4 | | N.A. | |
| 6/3-8 | | | | | | |
| APOA1 | | | | | | |
| sgRNA | | | | | | |
| MG3- | | 1454 | MG3-6/3-8 mApoa1 BE E8 | | N.A. | |
| 6/3-8 | | | | | | |
| APOA1 | | | | | | |
| sgRNA | | | | | | |
| MG3- | | 1455 | MG3-6/3-8 mApoa1 BE F12 | | N.A. | |
| 6/3-8 | | | | | | |
| APOA1 | | | | | | |
| target | | | | | | |
| sequence | | | | | | |
| MG3- | | 1456 | MG3-6/3-8 mApoa1 BE D11 | | N.A. | |
| 6/3-8 | | | | | | |
| APOA1 | | | | | | |
| target | | | | | | |
| sequence | | | | | | |
| MG3- | | 1457 | MG3-6/3-8 mApoa1 BE C5 | | N.A. | |
| 6/3-8 | | | | | | |
| APOA1 | | | | | | |
| target | | | | | | |
| sequence | | | | | | |
| MG3- | | 1458 | MG3-6/3-8 mApoa1 BE A4 | | N.A. | |
| 6/3-8 | | | | | | |
| APOA1 | | | | | | |
| target | | | | | | |
| sequence | | | | | | |
| MG3- | | 1459 | MG3-6/3-8 mApoa1 BE F4 | | N.A. | |
| 6/3-8 | | | | | | |
| APOA1 | | | | | | |
| target | | | | | | |
| sequence | | | | | | |
| MG3- | | 1460 | MG3-6/3-8 mApoa1 BE A5 | | N.A. | |
| 6/3-8 | | | | | | |
| APOA1 | | | | | | |
| target | | | | | | |
| sequence | | | | | | |
| MG3- | | 1461 | MG3-6/3-8 mApoa1 BE E12 | | N.A. | |
| 6/3-8 | | | | | | |
| APOA1 | | | | | | |
| target | | | | | | |
| sequence | | | | | | |
| MG3- | | 1462 | MG3-6/3-8 mApoa1 BE A11 | | N.A. | |
| 6/3-8 | | | | | | |
| APOA1 | | | | | | |
| target | | | | | | |
| sequence | | | | | | |
| MG3- | | 1463 | MG3-6/3-8 mApoa1 BE B4 | | N.A. | |
| 6/3-8 | | | | | | |
| APOA1 | | | | | | |
| target | | | | | | |
| sequence | | | | | | |
| MG3- | | 1464 | MG3-6/3-8 mApoa1 BE G4 | | N.A. | |
| 6/3-8 | | | | | | |
| APOA1 | | | | | | |
| target | | | | | | |
| sequence | | | | | | |
| MG3- | | 1465 | MG3-6/3-8 mApoa1 BE B2 | | N.A. | |
| 6/3-8 | | | | | | |
| APOA1 | | | | | | |
| target | | | | | | |
| sequence | | | | | | |
| MG3- | | 1466 | MG3-6/3-8 mApoa1 BE D7 | | N.A. | |
| 6/3-8 | | | | | | |
| APOA1 | | | | | | |
| target | | | | | | |
| sequence | | | | | | |
| MG3- | | 1467 | MG3-6/3-8 mApoa1 BE B5 | | N.A. | |
| 6/3-8 | | | | | | |
| APOA1 | | | | | | |
| target | | | | | | |
| sequence | | | | | | |
| MG3- | | 1468 | MG3-6/3-8 mApoa1 BE G6 | | N.A. | |
| 6/3-8 | | | | | | |
| APOA1 | | | | | | |
| target | | | | | | |
| sequence | | | | | | |
| MG3- | | 1469 | MG3-6/3-8 mApoa1 BE A8 | | N.A. | |
| 6/3-8 | | | | | | |
| APOA1 | | | | | | |
| target | | | | | | |
| sequence | | | | | | |
| MG3- | | 1470 | MG3-6/3-8 mApoa1 BE F2 | | N.A. | |
| 6/3-8 | | | | | | |
| APOA1 | | | | | | |
| target | | | | | | |
| sequence | | | | | | |
| MG3- | | 1471 | MG3-6/3-8 mApoa1 BE E1 | | N.A. | |
| 6/3-8 | | | | | | |
| APOA1 | | | | | | |
| target | | | | | | |
| sequence | | | | | | |
| MG3- | | 1472 | MG3-6/3-8 mApoa1 BE B8 | | N.A. | |
| 6/3-8 | | | | | | |
| APOA1 | | | | | | |
| target | | | | | | |
| sequence | | | | | | |
| MG3- | | 1473 | MG3-6/3-8 mApoa1 BE H8 | | N.A. | |
| 6/3-8 | | | | | | |
| APOA1 | | | | | | |
| target | | | | | | |
| sequence | | | | | | |
| MG3- | | 1474 | MG3-6/3-8 mApoa1 BE H6 | | N.A. | |
| 6/3-8 | | | | | | |
| APOA1 | | | | | | |
| target | | | | | | |
| sequence | | | | | | |
| MG3- | | 1475 | MG3-6/3-8 mApoa1 BE F5 | | N.A. | |
| 6/3-8 | | | | | | |
| APOA1 | | | | | | |
| target | | | | | | |
| sequence | | | | | | |
| MG3- | | 1476 | MG3-6/3-8 mApoa1 BE H3 | | N.A. | |
| 6/3-8 | | | | | | |
| APOA1 | | | | | | |
| target | | | | | | |
| sequence | | | | | | |
| MG3- | | 1477 | MG3-6/3-8 mApoa1 BE H4 | | N.A. | |
| 6/3-8 | | | | | | |
| APOA1 | | | | | | |
| target | | | | | | |
| sequence | | | | | | |
| MG3- | | 1478 | MG3-6/3-8 mApoa1 BE E8 | | N.A. | |
| 6/3-8 | | | | | | |
| APOA1 | | | | | | |
| target | | | | | | |
| sequence | | | | | | |
| MG3- | | 1479 | MG3-6/3-8 mAngptl3 BE C12 | | N.A. | |
| 6/3-8 | | | | | | |
| ANGPTL3 | | | | | | |
| sgRNA | | | | | | |
| MG3- | | 1480 | MG3-6/3-8 mAngptl3 BE B2 | | N.A. | |
| 6/3-8 | | | | | | |
| ANGPTL3 | | | | | | |
| sgRNA | | | | | | |
| MG3- | | 1481 | MG3-6/3-8 mAngptl3 BE C1 | | N.A. | |
| 6/3-8 | | | | | | |
| ANGPTL3 | | | | | | |
| sgRNA | | | | | | |
| MG3- | | 1482 | MG3-6/3-8 mAngptl3 BE F3 | | N.A. | |
| 6/3-8 | | | | | | |
| ANGPTL3 | | | | | | |
| sgRNA | | | | | | |
| MG3- | | 1483 | MG3-6/3-8 mAngptl3 BE G1 | | N.A. | |
| 6/3-8 | | | | | | |
| ANGPTL3 | | | | | | |
| sgRNA | | | | | | |
| MG3- | | 1484 | MG3-6/3-8 mAngptl3 BE C12 | | N.A. | |
| 6/3-8 | | | | | | |
| ANGPTL3 | | | | | | |
| target | | | | | | |
| sequence | | | | | | |
| MG3- | | 1485 | MG3-6/3-8 mAngptl3 BE B2 | | N.A. | |
| 6/3-8 | | | | | | |
| ANGPTL3 | | | | | | |
| target | | | | | | |
| sequence | | | | | | |
| MG3- | | 1486 | MG3-6/3-8 mAngptl3 BE C1 | | N.A. | |
| 6/3-8 | | | | | | |
| ANGPTL3 | | | | | | |
| target | | | | | | |
| sequence | | | | | | |
| MG3- | | 1487 | MG3-6/3-8 mAngptl3 BE F3 | | N.A. | |
| 6/3-8 | | | | | | |
| ANGPTL3 | | | | | | |
| target | | | | | | |
| sequence | | | | | | |
| MG3- | | 1488 | MG3-6/3-8 mAngptl3 BE G1 | | N.A. | |
| 6/3-8 | | | | | | |
| ANGPTL3 | | | | | | |
| target | | | | | | |
| sequence | | | | | | |
| MG3- | | 1489 | MG3-6/3-8 mTrac BE E1 | | N.A. | |
| 6/3-8 | | | | | | |
| TRAC | | | | | | |
| sgRNA | | | | | | |
| MG3- | | 1490 | MG3-6/3-8 mTrac BE D10 | | N.A. | |
| 6/3-8 | | | | | | |
| TRAC | | | | | | |
| sgRNA | | | | | | |
| MG3- | | 1491 | MG3-6/3-8 mTrac BE E1 | | N.A. | |
| 6/3-8 | | | | | | |
| TRAC | | | | | | |
| target | | | | | | |
| sequence | | | | | | |
| MG3- | | 1492 | MG3-6/3-8 mTrac BE D10 | | N.A. | |
| 6/3-8 | | | | | | |
| TRAC | | | | | | |
| target | | | | | | |
| sequence | | | | | | |
| NGS | | 1493 | mApoa1 BE F12F | | N.A. | |
| primers | | | | | | |
| for | | | | | | |
| mApoa1 | | | | | | |
| BE F12 | | | | | | |
| NGS | | 1494 | mApoa1 BE D11F | | N.A. | |
| primers | | | | | | |
| for | | | | | | |
| mApoa1 | | | | | | |
| BE D11 | | | | | | |
| NGS | | 1495 | mApoa1 BE C5F | | N.A. | |
| primers | | | | | | |
| for | | | | | | |
| mApoa1 | | | | | | |
| BE C5 | | | | | | |
| NGS | | 1496 | mApoa1 BE A4F | | N.A. | |
| primers | | | | | | |
| for | | | | | | |
| mApoa1 | | | | | | |
| BE A4 | | | | | | |
| NGS | | 1497 | mApoa1 BE F4F | | N.A. | |
| primers | | | | | | |
| for | | | | | | |
| mApoa1 | | | | | | |
| BE F4 | | | | | | |
| NGS | | 1498 | mApoa1 BE A5F | | N.A. | |
| primers | | | | | | |
| for | | | | | | |
| mApoa1 | | | | | | |
| BE A5 | | | | | | |
| NGS | | 1499 | mApoa1 BE E12F | | N.A. | |
| primers | | | | | | |
| for | | | | | | |
| mApoa1 | | | | | | |
| BE E12 | | | | | | |
| NGS | | 1500 | mApoa1 BE A11F | | N.A. | |
| primers | | | | | | |
| for | | | | | | |
| mApoa1 | | | | | | |
| BE A11 | | | | | | |
| NGS | | 1501 | mApoa1 BE B4F | | N.A. | |
| primers | | | | | | |
| for | | | | | | |
| mApoa1 | | | | | | |
| BE B4 | | | | | | |
| NGS | | 1502 | mApoa1 BE G4F | | N.A. | |
| primers | | | | | | |
| for | | | | | | |
| mApoa1 | | | | | | |
| BE G4 | | | | | | |
| NGS | | 1503 | mApoa1 BE B2F | | N.A. | |
| primers | | | | | | |
| for | | | | | | |
| mApoa1 | | | | | | |
| BE B2 | | | | | | |
| NGS | | 1504 | mApoa1 BE D7F | | N.A. | |
| primers | | | | | | |
| for | | | | | | |
| mApoa1 | | | | | | |
| BE D7 | | | | | | |
| NGS | | 1505 | mApoa1 BE B5F | | N.A. | |
| primers | | | | | | |
| for | | | | | | |
| mApoa1 | | | | | | |
| BE B5 | | | | | | |
| NGS | | 1506 | mApoa1 BE G6F | | N.A. | |
| primers | | | | | | |
| for | | | | | | |
| mApoa1 | | | | | | |
| BE G6 | | | | | | |
| NGS | | 1507 | mApoa1 BE A8F | | N.A. | |
| primers | | | | | | |
| for | | | | | | |
| mApoa1 | | | | | | |
| BE A8 | | | | | | |
| NGS | | 1508 | mApoa1 BE F2F | | N.A. | |
| primers | | | | | | |
| for | | | | | | |
| mApoa1 | | | | | | |
| BE F2 | | | | | | |
| NGS | | 1509 | mApoa1 BE E1F | | N.A. | |
| primers | | | | | | |
| for | | | | | | |
| mApoa1 | | | | | | |
| BE E1 | | | | | | |
| NGS | | 1510 | mApoa1 BE B8F | | N.A. | |
| primers | | | | | | |
| for | | | | | | |
| mApoa1 | | | | | | |
| BE B8 | | | | | | |
| NGS | | 1511 | mApoa1 BE H8F | | N.A. | |
| primers | | | | | | |
| for | | | | | | |
| mApoa1 | | | | | | |
| BE H8 | | | | | | |
| NGS | | 1512 | mApoa1 BE H6F | | N.A. | |
| primers | | | | | | |
| for | | | | | | |
| mApoa1 | | | | | | |
| BE H6 | | | | | | |
| NGS | | 1513 | mApoa1 BE F5F | | N.A. | |
| primers | | | | | | |
| for | | | | | | |
| mApoa1 | | | | | | |
| BE F5 | | | | | | |
| NGS | | 1514 | mApoa1 BE H3F | | N.A. | |
| primers | | | | | | |
| for | | | | | | |
| mApoa1 | | | | | | |
| BE H3 | | | | | | |
| NGS | | 1515 | mApoa1 BE H4F | | N.A. | |
| primers | | | | | | |
| for | | | | | | |
| mApoa1 | | | | | | |
| BE H4 | | | | | | |
| NGS | | 1516 | mApoa1 BE E8F | | N.A. | |
| primers | | | | | | |
| for | | | | | | |
| mApoa1 | | | | | | |
| BE E8 | | | | | | |
| NGS | | 1517 | mAngptl3 BE C12F | | N.A. | |
| primers | | | | | | |
| for | | | | | | |
| mAngptl3 | | | | | | |
| BE C12 | | | | | | |
| NGS | | 1518 | mAngptl3 BE B2F | | N.A. | |
| primers | | | | | | |
| for | | | | | | |
| mAngptl3 | | | | | | |
| BE B2 | | | | | | |
| NGS | | 1519 | mAngptl3 BE C1F | | N.A. | |
| primers | | | | | | |
| for | | | | | | |
| mAngptl3 | | | | | | |
| BE C1 | | | | | | |
| NGS | | 1520 | mAngptl3 BE F3F | | N.A. | |
| primers | | | | | | |
| for | | | | | | |
| mAngptl3 | | | | | | |
| BE F3 | | | | | | |
| NGS | | 1521 | mAngptl3 BE G1F | | N.A. | |
| primers | | | | | | |
| for | | | | | | |
| mAngptl3 | | | | | | |
| BE G1 | | | | | | |
| NGS | | 1522 | mTrac BE E1F | | N.A. | |
| primers | | | | | | |
| for | | | | | | |
| mTrac | | | | | | |
| BE E1 | | | | | | |
| NGS | | 1523 | mTrac BE D10F | | N.A. | |
| primers | | | | | | |
| for | | | | | | |
| mTrac | | | | | | |
| BE D10 | | | | | | |
| NGS | | 1524 | mApoa1 BE F12R | | N.A. | |
| primers | | | | | | |
| for | | | | | | |
| mApoa1 | | | | | | |
| BE F12 | | | | | | |
| NGS | | 1525 | mApoa1 BE D11R | | N.A. | |
| primers | | | | | | |
| for | | | | | | |
| mApoa1 | | | | | | |
| BE D11 | | | | | | |
| NGS | | 1526 | mApoa1 BE C5R | | N.A. | |
| primers | | | | | | |
| for | | | | | | |
| mApoa1 | | | | | | |
| BE C5 | | | | | | |
| NGS | | 1527 | mApoa1 BE A4R | | N.A. | |
| primers | | | | | | |
| for | | | | | | |
| mApoa1 | | | | | | |
| BE A4 | | | | | | |
| NGS | | 1528 | mApoa1 BE F4R | | N.A. | |
| primers | | | | | | |
| for | | | | | | |
| mApoa1 | | | | | | |
| BE F4 | | | | | | |
| NGS | | 1529 | mApoa1 BE A5R | | N.A. | |
| primers | | | | | | |
| for | | | | | | |
| mApoa1 | | | | | | |
| BE A5 | | | | | | |
| NGS | | 1530 | mApoa1 BE E12R | | N.A. | |
| primers | | | | | | |
| for | | | | | | |
| mApoa1 | | | | | | |
| BE E12 | | | | | | |
| NGS | | 1531 | mApoa1 BE A11R | | N.A. | |
| primers | | | | | | |
| for | | | | | | |
| mApoa1 | | | | | | |
| BE A11 | | | | | | |
| NGS | | 1532 | mApoa1 BE B4R | | N.A. | |
| primers | | | | | | |
| for | | | | | | |
| mApoa1 | | | | | | |
| BE B4 | | | | | | |
| NGS | | 1533 | mApoa1 BE G4R | | N.A. | |
| primers | | | | | | |
| for | | | | | | |
| mApoa1 | | | | | | |
| BE G4 | | | | | | |
| NGS | | 1534 | mApoa1 BE B2R | | N.A. | |
| primers | | | | | | |
| for | | | | | | |
| mApoa1 | | | | | | |
| BE B2 | | | | | | |
| NGS | | 1535 | mApoa1 BE D7R | | N.A. | |
| primers | | | | | | |
| for | | | | | | |
| mApoa1 | | | | | | |
| BE D7 | | | | | | |
| NGS | | 1536 | mApoa1 BE B5R | | N.A. | |
| primers | | | | | | |
| for | | | | | | |
| mApoa1 | | | | | | |
| BE B5 | | | | | | |
| NGS | | 1537 | mApoa1 BE G6R | | N.A. | |
| primers | | | | | | |
| for | | | | | | |
| mApoa1 | | | | | | |
| BE G6 | | | | | | |
| NGS | | 1538 | mApoa1 BE A8R | | N.A. | |
| primers | | | | | | |
| for | | | | | | |
| mApoa1 | | | | | | |
| BE A8 | | | | | | |
| NGS | | 1539 | mApoa1 BE F2R | | N.A. | |
| primers | | | | | | |
| for | | | | | | |
| mApoa1 | | | | | | |
| BE F2 | | | | | | |
| NGS | | 1540 | mApoa1 BE E1R | | N.A. | |
| primers | | | | | | |
| for | | | | | | |
| mApoa1 | | | | | | |
| BE E1 | | | | | | |
| NGS | | 1541 | mApoa1 BE B8R | | N.A. | |
| primers | | | | | | |
| for | | | | | | |
| mApoa1 | | | | | | |
| BE B8 | | | | | | |
| NGS | | 1542 | mApoa1 BE H8R | | N.A. | |
| primers | | | | | | |
| for | | | | | | |
| mApoa1 | | | | | | |
| BE H8 | | | | | | |
| NGS | | 1543 | mApoa1 BE H6R | | N.A. | |
| primers | | | | | | |
| for | | | | | | |
| mApoa1 | | | | | | |
| BE H6 | | | | | | |
| NGS | | 1544 | mApoa1 BE F5R | | N.A. | |
| primers | | | | | | |
| for | | | | | | |
| mApoa1 | | | | | | |
| BE F5 | | | | | | |
| NGS | | 1545 | mApoa1 BE H3R | | N.A. | |
| primers | | | | | | |
| for | | | | | | |
| mApoa1 | | | | | | |
| BE H3 | | | | | | |
| NGS | | 1546 | mApoa1 BE H4R | | N.A. | |
| primers | | | | | | |
| for | | | | | | |
| mApoa1 | | | | | | |
| BE H4 | | | | | | |
| NGS | | 1547 | mApoa1 BE E8R | | N.A. | |
| primers | | | | | | |
| for | | | | | | |
| mApoa1 | | | | | | |
| BE E8 | | | | | | |
| NGS | | 1548 | mAngptl3 BE C12R | | N.A. | |
| primers | | | | | | |
| for | | | | | | |
| mAngptl | | | | | | |
| 3 BE | | | | | | |
| C12 | | | | | | |
| NGS | | 1549 | mAngptl3 BE B2R | | N.A. | |
| primers | | | | | | |
| for | | | | | | |
| mAngptl | | | | | | |
| 3 BE B2 | | | | | | |
| NGS | | 1550 | mAngptl3 BE C1R | | N.A. | |
| primers | | | | | | |
| for | | | | | | |
| mAngptl | | | | | | |
| 3 BE C1 | | | | | | |
| NGS | | 1551 | mAngptl3 BE F3R | | N.A. | |
| primers | | | | | | |
| for | | | | | | |
| mAngptl | | | | | | |
| 3 BE F3 | | | | | | |
| NGS | | 1552 | mAngptl3 BE G1R | | N.A. | |
| primers | | | | | | |
| for | | | | | | |
| mAngptl | | | | | | |
| 3 BE G1 | | | | | | |
| NGS | | 1553 | mTrac BE E1R | | N.A. | |
| primers | | | | | | |
| for | | | | | | |
| mTrac | | | | | | |
| BE E1 | | | | | | |
| NGS | | 1554 | mTrac BE D10R | | N.A. | |
| primers | | | | | | |
| for | | | | | | |
| mTrac | | | | | | |
| BE D10 | | | | | | |
| Plasmid | | 1555 | mRNA production | nucleotide | artificial | |
| | | | | | sequence | |
| MG131 | | 1556 | mutated adenine deaminase | protein | uncultivated | MG131-1v1 |
| adenine | | | | | organism | |
| deaminase | | | | | | |
| variant | | | | | | |
| MG131 | | 1557 | mutated adenine deaminase | protein | uncultivated | MG131-2v2 |
| adenine | | | | | organism | |
| deaminase | | | | | | |
| variant | | | | | | |
| MG131 | | 1558 | mutated adenine deaminase | protein | uncultivated | MG131-5v3 |
| adenine | | | | | organism | |
| deaminase | | | | | | |
| variant | | | | | | |
| MG131 | | 1559 | mutated adenine deaminase | protein | uncultivated | MG131-6v4 |
| adenine | | | | | organism | |
| deaminase | | | | | | |
| variant | | | | | | |
| MG131 | | 1560 | mutated adenine deaminase | protein | uncultivated | MG131-9v5 |
| adenine | | | | | organism | |
| deaminase | | | | | | |
| variant | | | | | | |
| MG131 | | 1561 | mutated adenine deaminase | protein | uncultivated | MG131-7v6 |
| adenine | | | | | organism | |
| deaminase | | | | | | |
| variant | | | | | | |
| MG131 | | 1562 | mutated adenine deaminase | protein | uncultivated | MG131-3v7 |
| adenine | | | | | organism | |
| deaminase | | | | | | |
| variant | | | | | | |
| MG134 | | 1563 | mutated adenine deaminase | protein | uncultivated | MG134-1v1 |
| adenine | | | | | organism | |
| deaminase | | | | | | |
| variant | | | | | | |
| MG134 | | 1564 | mutated adenine deaminase | protein | uncultivated | MG134-2v2 |
| adenine | | | | | organism | |
| deaminase | | | | | | |
| variant | | | | | | |
| MG134 | | 1565 | mutated adenine deaminase | protein | uncultivated | MG134-3v3 |
| adenine | | | | | organism | |
| deaminase | | | | | | |
| variant | | | | | | |
| MG134 | | 1566 | mutated adenine deaminase | protein | uncultivated | MG134-4v4 |
| adenine | | | | | organism | |
| deaminase | | | | | | |
| variant | | | | | | |
| MG135 | | 1567 | mutated adenine deaminase | protein | uncultivated | MG135-1v1 |
| adenine | | | | | organism | |
| deaminase | | | | | | |
| variant | | | | | | |
| MG135 | | 1568 | mutated adenine deaminase | protein | uncultivated | MG135v-2v2 |
| adenine | | | | | organism | |
| deaminase | | | | | | |
| variant | | | | | | |
| MG135 | | 1569 | mutated adenine deaminase | protein | uncultivated | MG135-4v3 |
| adenine | | | | | organism | |
| deaminase | | | | | | |
| variant | | | | | | |
| MG135 | | 1570 | mutated adenine deaminase | protein | uncultivated | MG135-5v4 |
| adenine | | | | | organism | |
| deaminase | | | | | | |
| variant | | | | | | |
| MG135 | | 1571 | mutated adenine deaminase | protein | uncultivated | MG135-6v5 |
| adenine | | | | | organism | |
| deaminase | | | | | | |
| variant | | | | | | |
| MG135 | | 1572 | mutated adenine deaminase | protein | uncultivated | MG135-8v6 |
| adenine | | | | | organism | |
| deaminase | | | | | | |
| variant | | | | | | |
| MG135 | | 1573 | mutated adenine deaminase | protein | uncultivated | MG135-7v7 |
| adenine | | | | | organism | |
| deaminase | | | | | | |
| variant | | | | | | |
| MG135 | | 1574 | mutated adenine deaminase | protein | uncultivated | MG135-3v8 |
| adenine | | | | | organism | |
| deaminase | | | | | | |
| variant | | | | | | |
| MG137 | | 1575 | mutated adenine deaminase | protein | uncultivated | MG137-1v1 |
| adenine | | | | | organism | |
| deaminase | | | | | | |
| variant | | | | | | |
| MG137 | | 1576 | mutated adenine deaminase | protein | uncultivated | MG137-2v2 |
| adenine | | | | | organism | |
| deaminase | | | | | | |
| variant | | | | | | |
| MG137 | | 1577 | mutated adenine deaminase | protein | uncultivated | MG137-4v3 |
| adenine | | | | | organism | |
| deaminase | | | | | | |
| variant | | | | | | |
| MG137 | | 1578 | mutated adenine deaminase | protein | uncultivated | MG137-6v4 |
| adenine | | | | | organism | |
| deaminase | | | | | | |
| variant | | | | | | |
| MG137 | | 1579 | mutated adenine deaminase | protein | uncultivated | MG137-17v5 |
| adenine | | | | | organism | |
| deaminase | | | | | | |
| variant | | | | | | |
| MG137 | | 1580 | mutated adenine deaminase | protein | uncultivated | MG137-9v6 |
| adenine | | | | | organism | |
| deaminase | | | | | | |
| variant | | | | | | |
| MG137 | | 1581 | mutated adenine deaminase | protein | uncultivated | MG137-11v7 |
| adenine | | | | | organism | |
| deaminase | | | | | | |
| variant | | | | | | |
| MG137 | | 1582 | mutated adenine deaminase | protein | uncultivated | MG137-12v8 |
| adenine | | | | | organism | |
| deaminase | | | | | | |
| variant | | | | | | |
| MG137 | | 1583 | mutated adenine deaminase | protein | uncultivated | MG137-13v9 |
| adenine | | | | | organism | |
| deaminase | | | | | | |
| variant | | | | | | |
| MG137 | | 1584 | mutated adenine deaminase | protein | uncultivated | MG137-15v10 |
| adenine | | | | | organism | |
| deaminase | | | | | | |
| variant | | | | | | |
| MG137 | | 1585 | mutated adenine deaminase | protein | uncultivated | MG137-5v11 |
| adenine | | | | | organism | |
| deaminase | | | | | | |
| variant | | | | | | |
| MG137 | | 1586 | mutated adenine deaminase | protein | uncultivated | MG137-14v12 |
| adenine | | | | | organism | |
| deaminase | | | | | | |
| variant | | | | | | |
| MG137 | | 1587 | mutated adenine deaminase | protein | uncultivated | MG137-16v13 |
| adenine | | | | | organism | |
| deaminase | | | | | | |
| variant | | | | | | |
| MG137 | | 1588 | mutated adenine deaminase | protein | uncultivated | MG137-8v14 |
| adenine | | | | | organism | |
| deaminase | | | | | | |
| variant | | | | | | |
| MG137 | | 1589 | mutated adenine deaminase | protein | uncultivated | MG137-3v15 |
| adenine | | | | | organism | |
| deaminase | | | | | | |
| variant | | | | | | |
| MG68 | | 1590 | mutated adenine deaminase | protein | uncultivated | MG68-55v1 |
| adenine | | | | | organism | |
| deaminase | | | | | | |
| variant | | | | | | |
| MG68 | | 1591 | mutated adenine deaminase | protein | uncultivated | MG68-27v2 |
| adenine | | | | | organism | |
| deaminase | | | | | | |
| variant | | | | | | |
| MG68 | | 1592 | mutated adenine deaminase | protein | uncultivated | MG68-52v3 |
| adenine | | | | | organism | |
| deaminase | | | | | | |
| variant | | | | | | |
| MG68 | | 1593 | mutated adenine deaminase | protein | uncultivated | MG68-15v4 |
| adenine | | | | | organism | |
| deaminase | | | | | | |
| variant | | | | | | |
| MG68 | | 1594 | mutated adenine deaminase | protein | uncultivated | MG68-58v5 |
| adenine | | | | | organism | |
| deaminase | | | | | | |
| variant | | | | | | |
| MG68 | | 1595 | mutated adenine deaminase | protein | uncultivated | MG68-25v6 |
| adenine | | | | | organism | |
| deaminase | | | | | | |
| variant | | | | | | |
| MG68 | | 1596 | mutated adenine deaminase | protein | uncultivated | MG68-18v7 |
| adenine | | | | | organism | |
| deaminase | | | | | | |
| variant | | | | | | |
| MG68 | | 1597 | mutated adenine deaminase | protein | uncultivated | MG68-45v8 |
| adenine | | | | | organism | |
| deaminase | | | | | | |
| variant | | | | | | |
| MG68 | | 1598 | mutated adenine deaminase | protein | uncultivated | MG68-13v9 |
| adenine | | | | | organism | |
| deaminase | | | | | | |
| variant | | | | | | |
| MG68 | | 1599 | mutated adenine deaminase | protein | uncultivated | MG68-4v10 |
| adenine | | | | | organism | |
| deaminase | | | | | | |
| variant | | | | | | |
| MG132 | | 1600 | mutated adenine deaminase | protein | uncultivated | MG132-1v1 |
| adenine | | | | | organism | |
| deaminase | | | | | | |
| variant | | | | | | |
| MG132 | | 1601 | mutated adenine deaminase | protein | uncultivated | MG132-1v2 |
| adenine | | | | | organism | |
| deaminase | | | | | | |
| variant | | | | | | |
| MG132 | | 1602 | mutated adenine deaminase | protein | uncultivated | MG132-1v3 |
| adenine | | | | | organism | |
| deaminase | | | | | | |
| variant | | | | | | |
| MG133 | | 1603 | mutated adenine deaminase | protein | uncultivated | MG133-1v1 |
| adenine | | | | | organism | |
| deaminase | | | | | | |
| variant | | | | | | |
| MG133 | | 1604 | mutated adenine deaminase | protein | uncultivated | MG133-2v2 |
| adenine | | | | | organism | |
| deaminase | | | | | | |
| variant | | | | | | |
| MG133 | | 1605 | mutated adenine deaminase | protein | uncultivated | MG133-7v3 |
| adenine | | | | | organism | |
| deaminase | | | | | | |
| variant | | | | | | |
| MG133 | | 1606 | mutated adenine deaminase | protein | uncultivated | MG133-4v4 |
| adenine | | | | | organism | |
| deaminase | | | | | | |
| variant | | | | | | |
| MG133 | | 1607 | mutated adenine deaminase | protein | uncultivated | MG133-12v5 |
| adenine | | | | | organism | |
| deaminase | | | | | | |
| variant | | | | | | |
| MG133 | | 1608 | mutated adenine deaminase | protein | uncultivated | MG133-5v6 |
| adenine | | | | | organism | |
| deaminase | | | | | | |
| variant | | | | | | |
| MG133 | | 1609 | mutated adenine deaminase | protein | uncultivated | MG133-9v7 |
| adenine | | | | | organism | |
| deaminase | | | | | | |
| variant | | | | | | |
| MG133 | | 1610 | mutated adenine deaminase | protein | uncultivated | MG133-14v8 |
| adenine | | | | | organism | |
| deaminase | | | | | | |
| variant | | | | | | |
| MG133 | | 1611 | mutated adenine deaminase | protein | uncultivated | MG133-8v9 |
| adenine | | | | | organism | |
| deaminase | | | | | | |
| variant | | | | | | |
| MG133 | | 1612 | mutated adenine deaminase | protein | uncultivated | MG133-10v10 |
| adenine | | | | | organism | |
| deaminase | | | | | | |
| variant | | | | | | |
| MG133 | | 1613 | mutated adenine deaminase | protein | uncultivated | MG133-13v11 |
| adenine | | | | | organism | |
| deaminase | | | | | | |
| variant | | | | | | |
| MG133 | | 1614 | mutated adenine deaminase | protein | uncultivated | MG133-3v12 |
| adenine | | | | | organism | |
| deaminase | | | | | | |
| variant | | | | | | |
| MG133 | | 1615 | mutated adenine deaminase | protein | uncultivated | MG133-6v13 |
| adenine | | | | | organism | |
| deaminase | | | | | | |
| variant | | | | | | |
| MG133 | | 1616 | mutated adenine deaminase | protein | uncultivated | MG133-11v14 |
| adenine | | | | | organism | |
| deaminase | | | | | | |
| variant | | | | | | |
| MG136 | | 1617 | mutated adenine deaminase | protein | uncultivated | MG136-1v1 |
| adenine | | | | | organism | |
| deaminase | | | | | | |
| variant | | | | | | |
| MG136 | | 1618 | mutated adenine deaminase | protein | uncultivated | MG136-6v2 |
| adenine | | | | | organism | |
| deaminase | | | | | | |
| variant | | | | | | |
| MG136 | | 1619 | mutated adenine deaminase | protein | uncultivated | MG136-12v3 |
| adenine | | | | | organism | |
| deaminase | | | | | | |
| variant | | | | | | |
| MG136 | | 1620 | mutated adenine deaminase | protein | uncultivated | MG136-2v4 |
| adenine | | | | | organism | |
| deaminase | | | | | | |
| variant | | | | | | |
| MG136 | | 1621 | mutated adenine deaminase | protein | uncultivated | MG136-3v5 |
| adenine | | | | | organism | |
| deaminase | | | | | | |
| variant | | | | | | |
| MG136 | | 1622 | mutated adenine deaminase | protein | uncultivated | MG136-9v6 |
| adenine | | | | | organism | |
| deaminase | | | | | | |
| variant | | | | | | |
| MG136 | | 1623 | mutated adenine deaminase | protein | uncultivated | MG136-10v7 |
| adenine | | | | | organism | |
| deaminase | | | | | | |
| variant | | | | | | |
| MG136 | | 1624 | mutated adenine deaminase | protein | uncultivated | MG136-11v8 |
| adenine | | | | | organism | |
| deaminase | | | | | | |
| variant | | | | | | |
| MG129 | | 1625 | mutated adenine deaminase | protein | uncultivated | MG129-1v1 |
| adenine | | | | | organism | |
| deaminase | | | | | | |
| variant | | | | | | |
| MG129 | | 1626 | mutated adenine deaminase | protein | uncultivated | MG129-2v2 |
| adenine | | | | | organism | |
| deaminase | | | | | | |
| variant | | | | | | |
| MG129 | | 1627 | mutated adenine deaminase | protein | uncultivated | MG129-11v3 |
| adenine | | | | | organism | |
| deaminase | | | | | | |
| variant | | | | | | |
| MG129 | | 1628 | mutated adenine deaminase | protein | uncultivated | MG129-3v4 |
| adenine | | | | | organism | |
| deaminase | | | | | | |
| variant | | | | | | |
| MG129 | | 1629 | mutated adenine deaminase | protein | uncultivated | MG129-7v5 |
| adenine | | | | | organism | |
| deaminase | | | | | | |
| variant | | | | | | |
| MG129 | | 1630 | mutated adenine deaminase | protein | uncultivated | MG129-4v6 |
| adenine | | | | | organism | |
| deaminase | | | | | | |
| variant | | | | | | |
| MG129 | | 1631 | mutated adenine deaminase | protein | uncultivated | MG129-9v7 |
| adenine | | | | | organism | |
| deaminase | | | | | | |
| variant | | | | | | |
| MG129 | | 1632 | mutated adenine deaminase | protein | uncultivated | MG129-10v8 |
| adenine | | | | | organism | |
| deaminase | | | | | | |
| variant | | | | | | |
| MG129 | | 1633 | mutated adenine deaminase | protein | uncultivated | MG129-12v9 |
| adenine | | | | | organism | |
| deaminase | | | | | | |
| variant | | | | | | |
| MG130 | | 1634 | mutated adenine deaminase | protein | uncultivated | MG130-3v1 |
| adenine | | | | | organism | |
| deaminase | | | | | | |
| variant | | | | | | |
| MG130 | | 1635 | mutated adenine deaminase | protein | uncultivated | MG130-1v2 |
| adenine | | | | | organism | |
| deaminase | | | | | | |
| variant | | | | | | |
| MG130 | | 1636 | mutated adenine deaminase | protein | uncultivated | MG130-5v3 |
| adenine | | | | | organism | |
| deaminase | | | | | | |
| variant | | | | | | |
| MG130 | | 1637 | mutated adenine deaminase | protein | uncultivated | MG130-2v4 |
| adenine | | | | | organism | |
| deaminase | | | | | | |
| variant | | | | | | |
| MG130 | | 1638 | mutated adenine deaminase | protein | uncultivated | MG130-4v5 |
| adenine | | | | | organism | |
| deaminase | | | | | | |
| variant | | | | | | |
| MG34-1 | | 1639 | MG68-4_nMG34-1 (D10A) | Protein | artificial | |
| adenine | | | | | sequence | |
| base | | | | | | |
| editor | | | | | | |
| MG34-1 | | 1640 | MG68-4 (D109Q)_nMG34-1 (D10A) | Protein | artificial | |
| adenine | | | | | sequence | |
| base | | | | | | |
| editor | | | | | | |
| MG34-1 | | 1641 | MG68-4 (D109N/H129N)_nMG34-1 | Protein | artificial | |
| adenine | | | (D10A) | | sequence | |
| base | | | | | | |
| editor | | | | | | |
| MG34-1 | | 1642 | MG68-4 (D109Q/H129N)_nMG34-1 | Protein | artificial | |
| adenine | | | (D10A) | | sequence | |
| base | | | | | | |
| editor | | | | | | |
| MG34-1 | | 1643 | MG68-4 | Protein | artificial | |
| adenine | | | (D7G/E10G/D109N)_nMG34-1 | | sequence | |
| base | | | (D10A) | | | |
| editor | | | | | | |
| MG34-1 | | 1644 | MG68-4 | Protein | artificial | |
| adenine | | | (D7G/E10G/D109Q)_nMG34-1 | | sequence | |
| base | | | (D10A) | | | |
| editor | | | | | | |
| RF253 | | 1645 | ssDNA substrate for testing ADA in | DNA | artificial | |
| | | | vitro | | sequence | |
| RF278 | | 1646 | ssDNA substrate for testing ADA in | DNA | artificial | |
| | | | vitro | | sequence | |
| MG | | 1647 | MG3-6/3-8 effector | protein | unknown | MSTDMKNYRIG |
| effectors | | | | | | VDVGDRSVGL |
| | | | | | | AAIEFDDDGLPI |
| | | | | | | QKLALVTFRHD |
| | | | | | | GGLDPTKNKTP |
| | | | | | | MSRKETRGIAR |
| | | | | | | RTMRMNRERK |
| | | | | | | RRLRNLDNVLE |
| | | | | | | NLGYSVPEGPE |
| | | | | | | PETYEAWTSRA |
| | | | | | | LLASIKLASADE |
| | | | | | | LNEHLVRAVRH |
| | | | | | | MARHRGWANP |
| | | | | | | WWSLDQLEKA |
| | | | | | | SQEPSETFEIILA |
| | | | | | | RARELFGEKVP |
| | | | | | | ANPTLGMLGAL |
| | | | | | | AANNEVLLRPR |
| | | | | | | DEKKRKTGYV |
| | | | | | | RGTPLMFAQVR |
| | | | | | | QGDQLAELRRI |
| | | | | | | CEVQGIEDQYE |
| | | | | | | ALRLGVFDHKH |
| | | | | | | PYVPKERVGKD |
| | | | | | | PLNPSTNRTIRA |
| | | | | | | SLEFQEFRILDS |
| | | | | | | VANLRVRIGSR |
| | | | | | | AKRELTEAEYD |
| | | | | | | AAVEFLMDYA |
| | | | | | | DKEQPSWADV |
| | | | | | | AEKIGVPGNRL |
| | | | | | | VAPVLEDVQQK |
| | | | | | | TAPYDRSSAAF |
| | | | | | | EKAMGKKTEA |
| | | | | | | RQWWESTDDD |
| | | | | | | QLRSLLIAFLVD |
| | | | | | | ATNDTEEAAAE |
| | | | | | | AGLSELYKSWP |
| | | | | | | AEEREALSNIDF |
| | | | | | | EKGRVAYSQET |
| | | | | | | LSKLSEYMHEY |
| | | | | | | RVGLHEARKA |
| | | | | | | VFGVDDTWRPP |
| | | | | | | LDKLEEPTGQP |
| | | | | | | AVDRVLTILRR |
| | | | | | | FVLDCERQWG |
| | | | | | | RPRAITVEHTRT |
| | | | | | | GLMGPTQRQKI |
| | | | | | | LNEQKKNRAD |
| | | | | | | NERIRDELRESG |
| | | | | | | VDNPSRAEVRR |
| | | | | | | HLIVQEQECQC |
| | | | | | | LYCGTMITTTTS |
| | | | | | | ELDHIVPRAGG |
| | | | | | | GSSRRENLAAV |
| | | | | | | CRACNAKKKR |
| | | | | | | ELFYAWAGPV |
| | | | | | | KSQETIERVRQL |
| | | | | | | KAFKDSKKAK |
| | | | | | | MFKNQIRRLNQ |
| | | | | | | TEADEPIDERSL |
| | | | | | | ASTSYAAVAVR |
| | | | | | | ERLEQHFNEGL |
| | | | | | | ALDDKSRVVLD |
| | | | | | | VYAGAVTRESR |
| | | | | | | RAGGIDERILLR |
| | | | | | | GERDKNRFDVR |
| | | | | | | HHAVDAAVMT |
| | | | | | | LLNRSVALTLE |
| | | | | | | QRSQLRRAFYE |
| | | | | | | QGLDKLDRDQL |
| | | | | | | KPEEDWRNFIG |
| | | | | | | LSLASQEKFLE |
| | | | | | | WKKVTTVLGD |
| | | | | | | LLAEAIEDDSIA |
| | | | | | | VVSPLRLRPQN |
| | | | | | | GRVHKDTIAAV |
| | | | | | | KKQTLGSAWS |
| | | | | | | ADAVKRIVDPEI |
| | | | | | | YLAMKDALGK |
| | | | | | | SKVLPEDSART |
| | | | | | | LELSDGRYLEA |
| | | | | | | DDEVLFFPKNA |
| | | | | | | ASILTPRGVAEI |
| | | | | | | GGSIHHARLYS |
| | | | | | | WLTKKGELKIG |
| | | | | | | MLRVYGAEFP |
| | | | | | | WLMRESGSHD |
| | | | | | | VLRMPIHPGSQ |
| | | | | | | SFRDMQDTTRK |
| | | | | | | AVESSEAVEFA |
| | | | | | | WITQNDELEFE |
| | | | | | | PEDYIAHGGKD |
| | | | | | | ELRQFLEFMPE |
| | | | | | | CRWRVDGFKK |
| | | | | | | NYQIRIRPAMLS |
| | | | | | | REQLPSDIQRRL |
| | | | | | | ESKTLTENESLL |
| | | | | | | LKALDTGLVVA |
| | | | | | | IGGLLPLGTLKV |
| | | | | | | IRRNNLGFPRW |
| | | | | | | RGNGNLPTSFE |
| | | | | | | VRSSALRALGV |
| | | | | | | EG |
| MG | | 1648 | MG3-6/3-8 effector sgRNA | RNA | synthetic | NNNNNNNNNN |
| effectors | | | | | | NNNNNNNNNN |
| sgRNA | | | | | | NNGTTGAGAA |
| | | | | | | TCGAAAGATTC |
| | | | | | | TTAATAAGGCA |
| | | | | | | TCCTTCCGATG |
| | | | | | | CTGACTTCTCA |
| | | | | | | CCGTCCGTTTT |
| | | | | | | CCAATAGGAG |
| | | | | | | CGGGCGGTAT |
| | | | | | | GTTTT |

### EXAMPLES

### Example 1—Plasmid Construction for Base Editors

[0391] To create base editing enzymes that utilize CRISPR functionality to target their base editing, effector enzymes were fused in various configurations to the examplary deaminases described herein. This process involved a first stage of constructing vectors suitable for generating the fusion enzymes. Two entry plasmid vectors, MGA, and MGC, were first constructed.

[0392] To construct the MGA (Metagenomi adenine base editor) entry plasmid containing T7 promoter-His tag-TadA*(ABE8.17m)-SV40 NLS, three DNA fragments were amplified from pAL6. To construct the MGC (Metagenomi cytosine base editor) entry plasmid containing T7 promoter-His tag-APOBEC1(BE3)-UGI-SV40 NLS, APOBEC1 and UGI-SV40 NLS were amplified from pAL9 and two pieces of vector backbones were amplified from pAL6 (see FIG. 3).

[0393] To introduce mutations into the effectors, source plasmids containing MG1-4, MG1-6, MG3-6, MG3-7, MG3-8, MG4-5, MG14-1, MG15-1, or MG18-1 effector gene sequences were amplified by Q5 DNA polymerase with forward primers incorporating appropriate mutations and reverse primers. The linear DNA fragments were then phosphorylated and ligated. The DNA templates were digested with DpnI using KLD Enzyme Mix (New England Biolabs) per the manufacturer's instructions.

[0394] To generate the pMGA and pMGC expression plasmids, genes were amplified from plasmids carrying mutated effectors and cloned into MGA and MGC entry plasmids via XhoI and SacII sites, respectively. To clone sgRNA expression cassettes comprising T7 promoter-sgRNA-bidirectional terminator into BE expression plasmids, one set of primers (P366 as the forward primer) was used to amplify a T7 promoter-spacer sequence while another set of primers (P367 as the reverse primer) was used to amplify spacer sequence-sgRNA scaffold-bidirectional terminator, in which pTCM plasmids were used as templates (see FIG. 2). The two fragments were assembled into pMGA and pMGC via XbaI sites, resulting pMGA-sgRNA and pMGC-sgRNA, respectively.

TABLE 3
Summary of constructs made for ABE
screening systems described herein

| # | Application | Candidate |
|---|---|---|
| 1 | ABE | MGA1-4-sgRNA1 |
| 2 | | MGA1-4-sgRNA2 |
| 3 | | MGA1-4-sgRNA3 |
| 4 | | MGA1-6-sgRNA1 |
| 5 | | MGA1-6-sgRNA2 |
| 6 | | MGA1-6-sgRNA3 |
| 7 | | MGA3-6-sgRNA1 |
| 8 | | MGA3-6-sgRNA2 |
| 9 | | MGA3-6-sgRNA3 |
| 10 | | MGA3-7-sgRNA1 |
| 11 | | MGA3-7-sgRNA2 |
| 12 | | MGA3-7-sgRNA3 |
| 13 | | MGA3-8-sgRNA1 |
| 14 | | MGA3-8-sgRNA2 |
| 15 | | MGA3-8-sgRNA3 |
| 16 | | MGA14-1-sgRNA1 |
| 17 | | MGA14-1-sgRNA2 |
| 18 | | MGA14-1-sgRNA3 |
| 19 | | MGA15-1-sgRNA1 |
| 20 | | MGA15-1-sgRNA2 |
| 21 | | MGA15-1-sgRNA3 |
| 22 | | MGA18-1-sgRNA1 |
| 23 | | MGA18-1-sgRNA2 |
| 24 | | MGA18-1-sgRNA3 |
| 25 | | ABE8.17m-sgRNA1 |
| 26 | | ABE8.17m-sgRNA2 |
| 27 | | ABE8.17m-sgRNA3 |
| 28 | CBE | MGC1-4-sgRNA1 |
| 29 | | MGC1-4-sgRNA2 |
| 30 | | MGC1-4-sgRNA3 |
| 31 | | MGC1-6-sgRNA1 |
| 32 | | MGC1-6-sgRNA2 |
| 33 | | MGC1-6-sgRNA3 |
| 34 | | MGC3-6-sgRNA1 |
| 35 | | MGC3-6-sgRNA2 |
| 36 | | MGC3-6-sgRNA3 |
| 37 | | MGC3-7-sgRNA1 |
| 38 | | MGC3-7-sgRNA2 |
| 39 | | MGC3-7-sgRNA3 |
| 40 | | MGC3-8-sgRNA1 |
| 41 | | MGC3-8-sgRNA2 |
| 42 | | MGC3-8-sgRNA3 |
| 43 | | MGC4-5-sgRNA1 |
| 44 | | MGC4-5-sgRNA2 |
| 45 | | MGC4-5-sgRNA3 |
| 46 | | MGC14-1-sgRNA1 |
| 47 | | MGC14-1-sgRNA2 |
| 48 | | MGC14-1-sgRNA3 |
| 49 | | MGC15-1-sgRNA1 |
| 50 | | MGC15-1-sgRNA2 |
| 51 | | MGC15-1-sgRNA3 |
| 52 | | MGC18-1-sgRNA1 |
| 53 | | MGC18-1-sgRNA2 |
| 54 | | MGC18-1-sgRNA3 |
| 55 | | BE3-sgRNA1 |
| 56 | | BE3-sgRNA2 |
| 57 | | BE3-sgRNA3 |

[0395] All amplified DNA fragments were purified by QIAquick Gel Extraction Kit (Qiagen), assembled via NEBuilder HiFi DNA Assembly (New England Biolabs), and the resulting assemblies were propagated via Endura Electrocompetent cells (Lucergen) per the manufacturer's instructions (see FIGS. 4 & 5). The DNA sequences of all cloned genes were confirmed at ELIM BIOPHARM.

TABLE 4
Conserved catalytic residues parsed out
for selected systems described herein

| Nickase | | Associated Full-length |
|---|---|---|
| Candidate | Length | Protein Sequence |
| nMG1-4 (D9A) | 1025 | SEQ ID NO: 70 |
| nMG1-6 (D13A) | 1059 | SEQ ID NO: 71 |
| nMG3-6 (D13A) | 1134 | SEQ ID NO: 72 |
| nMG3-7 (D12A) | 1131 | SEQ ID NO: 73 |
| nMG3-8 (D13A) | 1132 | SEQ ID NO: 74 |
| nMG4-5 (D17A) | 1055 | SEQ ID NO: 75 |
| nMG14-1 (D23A) | 1003 | SEQ ID NO: 76 |
| nMG15-1 (D8A) | 1082 | SEQ ID NO: 77 |
| nMG18-1 (D12A) | 1348 | SEQ ID NO: 78 |

### Example 2—Protein Expression and Purification

[0396] The T7 promoter driven mutated effector genes in the pMGA and pMGC plasmids were expressed in E. coli BL21 (DE3) cells in Magic Media per manufacturer's instructions (Thermo) by transformation with each of the respective plasmids described in Example 1 above. After a 40 hour incubation at 16° C. the transformed cells were harvested, suspended in lysis buffer (HisTrap equilibration buffer: 20 mM Tris (Sigma T2319-100_ML), 300 mM sodium chloride (VWR VWRVE529-500_ML), 5% glycerol, 10 mM MgCl₂, with 10 mM imidazole (Sigma 68268-100 ML-F); pH 7.5) and EDTA-free protease inhibitor (Pierce), and frozen in the −80° C. freezer. The cells were then thawed on ice, sonicated, clarified, and filtered before affinity purification. The protein was applied to Cytiva 5 ml HisTrap FF column on the Akta Avant FPLC per the manufacturer's specifications and the protein was eluted in an isocratic elution of 20 mM Tris (Sigma T2319-100_ML), 300 mM sodium chloride (VWR VWRVE529-500_ML), 5% glycerol, 10 mM MgCl₂, with 250 mM imidazole (Sigma 68268-100_ML-F); pH 7.5. Eluted fractions containing the His-tagged effector proteins were concentrated and buffer exchanged into 50 mM Tris-HCl, 300 mM NaCl, 1 mM TCEP, 5% glycerol; pH 7.5. The protein concentration was determined by bicinchoninic acid assay (Thermo) and adjusted after determining the relative purity by SDS PAGE densitometry in Image Lab (Bio-Rad) (see FIG. 7).

### Example 3—In Vitro Nickase Assay

[0397] 6-carboxyfluorescein (6-FAM) labeled primers P141 and P146 (SEQ ID NOs: 179 and 180) synthesized by IDT were used to amplify linear fragments of LacZ containing targeting sequences of effectors using Q5 DNA polymerase. DNA fragments containing the T7 promoter followed by sgRNAs containing 20-bp or 22-bp spacer sequences were transcribed in vitro using HiScribe T7 High Yield RNA Synthesis Kit (New England Biolabs) per manufacturer's instructions. Synthetic sgRNAs with the sequences corresponding to the named sgRNAs in the sequence listing were purified by Monarch RNA Cleanup Kit (New England Biolabs) according to the users manual and concentrations were measured by Nanodrop.

[0398] To determine DNA nickase activity, each of the purified mutated effectors was first supplemented with its cognate sgRNA. Reactions were initiated by adding the linear DNA substrate in a 15 μL reaction mixture containing 10 mM Tris pH 7.5, 10 mM MgCl₂, and 100 mM NaCl, 150 nM enzyme, 150 nM RNA, and 15 nM DNA. The reaction was incubated at 37° C. for 2h. Digested DNA was purified using AMPure XP SPRI paramagnetic beads (Beckman Coulter) and eluted with 6 μL TE buffer (10 mM Tris, 1 mM EDTA; pH 8.0). The nicked DNA was resolved on a 10% TBE-Urea denaturing gel (Biorad) and imaged by ChemiDoc (Bio-Rad) (see FIG. 7, which shows that the depicted enzymes display nickase activity by production of bands 600 and 200 bases versus 400 and 200 bases in the case of the wild-type enzyme). The results indicated that all the tested nickase mutants in FIG. 7 displayed their expected nickase activity instead of wild type cleavage activity with the exception of MG4-5 (D17A), which was inconclusive.

### Example 4—Base Editor Introduction into E. coli

[0399] Plasmids were transformed into Lucergen's electrocompetent BL21(DE3) cells according to the manufacturer's instructions. After electroporation, cells were recovered with expression recovery media at 37° C. for 1 h and spread on LB plates containing 100 L/mg ampicillin and 0.1 mM IPTG. After overnight growth at 37° C., colonies were picked and lacZ gene was amplified by Q5 DNA polymerase (New England Biolabs) with primers P137 and P360. The resulting PCR products were purified and sequenced by Sanger sequencing at ELIM BIOPHARM. Base edits were determined by examining whether there exists C to T conversion or A to G conversion in the targeted protospacer regions for cytosine base editors or adenine base editors, respectively.

[0400] To evaluate editing efficiency in E. coli, plasmids were transformed into electrocompetent BL21(DE3) (Lucergen) and the electroporated cells were recovered with expression recovery media at 37° C. for 1 h. 10 μL of recovered cells were then inoculated into 990 μL SOB containing 100 μL/mg ampicillin and 0.1 mM IPTG in a 96-well deep well plate, and grown at 37° C. for 20h. 1 μL cells induced for base editor expression were used for amplification of the lacZ gene in a 20 μL PCR reaction (Q5 DNA polymerase) with primers P137 and P360. The resulting PCR products were purified and sequenced by Sanger sequencing at ELIM BIOPHARM. Quantification of editing efficiency was processed by Edit R as described in Example 12.

TABLE 5
The MG base editors described herein with associated PAM and deaminases

| | | | | Linker | | | Linker |
|---|---|---|---|---|---|---|---|
| | | | | (Deaminase- | | | (Nickase- |
| Candidate | Type | PAM | Deaminase | Nickase) | Nickase | UGI | UGI) |
| MGA1-4 | II | nRRR | TadA* | SGGSSGGSSGSE | nMG1-4 (D9A) | | |
| | | Sequence | (ABE8.17m) | TPGTSESATPESS | SEQ ID NO: 70 | | |
| | | Number: A360 | SEQ ID NO: 595 | GGSSGGS | | | |
| MGA3-7 | II | nnRnYAY | TadA* | SGGSSGGSSGSE | nMG3-7 (D12A) | | |
| | | Sequence | (ABE8.17m) | TPGTSESATPESS | SEQ ID NO: 73 | | |
| | | Number: A363 | SEQ ID NO: 595 | GGSSGGS | | | |
| MGA18-1 | II | nRWART | TadA* | SGGSSGGSSGSE | nMG18-1 | | |
| | | Sequence | (ABE8.17m) | TPGTSESATPESS | (D12A) | | |
| | | Number: A368 | SEQ ID NO: 595 | GGSSGGS | SEQ ID NO: 78 | | |
| MGC1-6 | II | nnRRAY | APOBEC1 (BE3) | SGSETPGTSESAT | nMG1-6 (D13A) | UGI (BE3) | GSGGS |
| | | Sequence | SEQ ID NO: 58 | PESA | SEQ ID NO: 71 | SEQ ID | |
| | | Number: A361 | | | | NO: 67 | |
| MGC3-7 | II | nnRnYAY | APOBEC1 (BE3) | SGSETPGTSESAT | nMG3-7 (D12A) | UGI (BE3) | GSGGS |
| | | Sequence | SEQ ID NO: 58 | PESA | SEQ ID NO: 73 | SEQ ID | |
| | | Number: A363 | | | | NO: 67 | |
| MGC4-5 | II | nRCCV | APOBEC1 (BE3) | SGSETPGTSESAT | nMG4-5 (D17A) | UGI (BE3) | GSGGS |
| | | Sequence | SEQ ID NO: 58 | PESA | SEQ ID NO: 74 | SEQ ID | |
| | | Number: A365 | | | | NO: 67 | |
| MGC14-1 | II | nRnnGRKA | APOBEC1 (BE3) | SGSETPGTSESAT | nMG14-1 | UGI (BE3) | GSGGS |
| | | Sequence | SEQ ID NO: 58 | PESA | (D23A) | SEQ ID | |
| | | Number: A366 | | | SEQ ID NO: 76 | NO: 67 | |
| MGC15-1 | II | nnnnC | APOBEC1 (BE3) | SGSETPGTSESAT | nMG15-1 (D8A) | UGI (BE3) | GSGGS |
| | | Sequence | SEQ ID NO: 58 | PESA | SEQ ID NO: 77 | SEQ ID | |
| | | Number: A367 | | | | NO: 67 | |
| MGC18-1 | II | nRWART | APOBEC1 (BE3) | SGSETPGTSESAT | nMG18-1 | UGI (BE3) | GSGGS |
| | | Sequence | SEQ ID NO: 58 | PESA | (D12A) | | |
| | | Number: A368 | | | SEQ ID NO: 78 | | |

### Example 5—Protein Nucleofection and Amplicon Seq in Mammalian Cells (Prophetic)

[0401] Nucleofection is conducted in mammalian cells (e.g. K-562, Neuro-2A or RAW264.7) according to the manufacturer's recommendations using a Lonza 4D nucleofector and the Lonza SF Cell Line 4D-Nucleofector X Kit S (cat. no. V4XC-2032). After formulating the SF nucleofection buffer, 200,000 cells are resuspended in 5 μl of buffer per nucleofection. In the remaining 15 μl of buffer per nucleofection, 20 pmol of chemically modified sgRNA from Synthego is combined with 18 pmol of base editor enzymes (e.g. ABE8e) and incubated for 5 min at room temperature to complex. Cells are added to the 20 μl nucleofection cuvettes, followed by protein solution, and the mixture is triturated to mix. Cells are nucleofected with program CM-130, immediately after which 80 μl of warmed media is added to each well for recovery. After 5 min, 25 μl from each sample is added to 250 μl of fresh media in a 48-well poly-d-lysine plate (Corning). Cells are then treated in the same way as lipofected cells above for genomic DNA extraction after three more days of culture.

[0402] Following Illumina barcoding, PCR products are pooled and purified by electrophoresis with a 2% agarose gel using a Monarch DNA Gel Extraction Kit (New England Biolabs), eluting with 30 μl H2O. DNA concentration is quantified with a Qubit dsDNA High Sensitivity Assay Kit (Thermo Fisher Scientific) and sequenced on an Illumina MiSeq instrument (paired-end read, R1: 250-280 cycles, R2: 0 cycles) according to the manufacturer's protocols.

[0403] Sequencing reads are demultiplexed using the MiSeq Reporter (Illumina) and FASTQ files are analyzed using CRISPResso2. Dual editing in individual alleles is analyzed by a Python script. Base editing values are representative of n=3 independent biological replicates collected by different researchers, with the mean±s.d. shown. Base editing values are reported as a percentage of the number of reads with adenine mutagenesis over the total aligned reads.

### Example 6—Plasmid Nucleofection and Whole Genome Seq in Mammalian Cells (Prophetic)

[0404] All plasmids are assembled by the uracil-specific excision reagent (USER) cloning method. Guide RNA plasmids for SpCas9, SaCas9 and all engineered variants are assembled. Plasmids for mammalian cell transfections are prepared using the ZymoPURE Plasmid Midiprep kit (Zymo Research Corporation). HEK293T cells (ATCC CRL-3216) are cultured in Dulbecco's modified Eagle's medium (Corning) supplemented with 10% fetal bovine serum (ThermoFisher Scientific) and maintained at 37° C. with 5% CO2.

[0405] HEK293T cells are seeded on 48-well poly-d-lysine plates (Corning) in the same culture medium. Cells are transfected 12-16 h after plating with 1.5 μl Lipofectamine 2000 (ThermoFisher Scientific) using 750 ng base editor plasmid, 250 ng guide RNA plasmid and 10 ng green fluorescent protein as a transfection control. Cells are cultured for 3 d with media exchanged following the first day, then washed with Å˜1 PBS (ThermoFisher Scientific), followed by genomic DNA extraction by addition of 100 μl freshly prepared lysis buffer (10 mM Tris-HCl, pH 7.5, 0.05% SDS, 25 μg ml−1 proteinase K (ThermoFisher Scientific)) directly into each transfected well. The mixture is incubated at 37° C. for 1 h then heat inactivated at 80° C. for 30 min. Genomic DNA lysate is subsequently used immediately for high-throughput sequencing (HTS).

[0406] HTS of genomic DNA from HEK293T cells is performed. Following Illumina barcoding, PCR products are pooled and purified by electrophoresis with a 2% agarose gel using a Monarch DNA Gel Extraction Kit (NEB), eluting with 30 μl H2O. DNA concentration is quantified with Qubit dsDNA High Sensitivity Assay Kit (ThermoFisher Scientific) and sequenced on an Illumina MiSeq instrument (paired end read, R1: 250-280 cycles, R2: 0 cycles) according to the manufacturer's protocols.

### Example 7—Determining Editing Window (Prophetic)

[0407] To examine the editing window regions, the cytosine showing the highest C-T conversion frequency in a specified sgRNA is normalized to 1, and other cytosines at positions spanning from 30 nt upstream to 10 nt downstream of the PAM sequence (total 43 bp) of the same sgRNA are normalized subsequently. Then normalized C-T conversion frequencies are classified and compared according to their positions for all tested sgRNAs of a specified base editor. A comprehensive editing window (CEW) is defined to span positions with an average C-T conversion efficiency exceeding 0.6 after normalization.

[0408] To examine the substrate preference for each cytidine deaminase, C sites are initially classified according to their positions in sgRNA targeting regions and those positions containing at least one C site with ≥0.8 normalized C-T conversion frequency are included in subsequent analysis. Selected C sites are then compared depending on base types upstream or downstream of the edited cytosine (NC or CN). For cytidine deaminases showing efficient C-T conversion at both N-terminus and C-terminus of the endonuclease, the substrate preference is evaluated by integrating respective NT- and CT-CBEs together. For statistical analysis, one-way ANOVA is used and p<0.05 is considered as significant

### Example 8a—Testing Off-Target Analysis with Whole Genome Sequencing and Transcriptomics in Mammalian Cells (Prophetic)

[0409] HEK293T cells are plated on 48-well poly-d-lysine-coated plates 16 to 20 h before lipofection at a density of 3.104 cells per well in DMEM+GlutaMAX medium (Thermo Fisher Scientific) without antibiotics. 750 ng nickase or base editor expression plasmid DNA is combined with 250 ng of sgRNA expression plasmid DNA in 15 μl Opti-MEM+GlutaMAX. This is combined with 10 μl of lipid mixture, comprising 1.5 μl Lipofectamine 2000 and 8.5 μl Opti-MEM+GlutaMAX per well. Cells are harvested 3 d after transfection and either DNA or RNA was harvested. For DNA analysis, cells are washed once in PBS, and then lysed in 100 μl QuickExtract Buffer (Lucigen) according to the manufacturer's instructions. For RNA harvest, the MagMAX mirVana Total RNA Isolation Kit (Thermo Fisher Scientific) is used with the KingFisher Flex.

[0410] Genomic DNA from mammalian cells is fragmented and adapter-ligated using the Nextera DNA Flex Library Prep Kit (Illumina) using 96-well plate Nextera indexing primers (Illumina), according to the manufacturer's instructions. Library size and concentration is confirmed by Fragment Analyzer (Agilent) and DNA is sent to Novogene for WGS using an Illumina HiSeq system.

[0411] All targeted NGS data is analyzed by performing four general operations: (1) alignment; (2) duplicate marking; (3) variant calling; and (4) background filtration of variants to remove artifacts and germline mutations. The mutation reference and alternate alleles are reported relative to the plus strand of the reference genome.

[0412] For whole Transcriptome sequencing, mRNA selection is performed using the NEBNext Poly(A) mRNA Magnetic Isolation Module (New England BioLabs). RNA library preparation is performed using NEBNext Ultra II RNA Library Prep Kit for Illumina (New England BioLabs). Based on the RNA input amount, a cycle number of 12 is used for the PCR enrichment of adapter-ligated DNA. NEBNext Sample Purification Beads (New England BioLabs) is used throughout for all of the size selection performed by this method. NEBNext Multiplex Oligos for Illumina (New England BioLabs) is used for the multiplex indexes in accordance with the PCR recipe outlined in the protocol. Before sequencing, samples are quality checked using the High Sensitivity D1000 ScreenTape on the 4200 TapeStation System (Agilent). The libraries are pooled and sequenced using a NovaSeq (Novogene). Targeted RNA sequencing is then performed. Complementary DNA is generated by PCR with reverse transcription (RT-PCR) from the isolated RNA using the SuperScript IV One-Step RT-PCR System with EZDnase (Thermo Fisher Scientific) according to the manufacturer's instructions.

[0413] The following program is used: 58° C. for 12 min; 98° C. for 2 min; followed by PCR cycles that varied by amplicon: for CTNNB1 and IP90; 32 cycles of (98° C. for 10 s; 60° C. for 10 sec; 72° C. for 30 sec). Following the combined RT-PCR, amplicons are barcoded and sequenced using an Illumina MiSeq sequencer as described above. The first 125 nucleotides in each amplicon, beginning at the first base after the end of the forward primer in each amplicon, are aligned to a reference sequence and used for analysis of maximum A-to-I frequencies in each amplicon. Off-target DNA sequencing is performed using primers, using a two-stage PCR and barcoding method to prepare samples for sequencing using Illumina MiSeq sequencers as above.

### Example 8b—Analysis of Off-Target Edits by Whole Genome Sequencing and Transcriptomics (Prophetic)

[0414] Transfected cells prepared as in Example 8a are harvested after 3 days and the genomic DNA isolated using the Agencourt DNAdvance Genomic DNA Isolation Kit (Beckman Coulter) according to the manufacturer's instructions. On-target and off-target genomic regions of interest are amplified by PCR with flanking HTS primer pairs. PCR amplification is carried out with Phusion high-fidelity DNA polymerase (ThermoFisher) according to the manufacturer's instructions using 5 ng of genomic DNA as a template. Cycle numbers are determined separately for each primer pair as to ensure the reaction was stopped in the linear range of amplification (30, 28, 28, 28, 32, and 32 cycles for EMX1, FANCF, HEK293 site 2, HEK293 site 3, HEK293 site 4, and RNF2 primers, respectively). PCR products are purified using RapidTips (Diffinity Genomics). Purified DNA is amplified by PCR with primers containing sequencing adaptors. The products are gel-purified and quantified using the Quant-iT™ PicoGreen dsDNA Assay Kit (ThermoFisher) and KAPA Library Quantification Kit-Illumina (KAPA Biosystems). Samples are sequenced on an Illumina MiSeq as previously described.

[0415] Sequencing reads are automatically demultiplexed using MiSeq Reporter (Illumina), and individual FASTQ files are analyzed with a custom Matlab script. Each read is pairwise aligned to the appropriate reference sequence using the Smith-Waterman algorithm. Base calls with a Q-score below 31 are replaced with N's and are thus excluded in calculating nucleotide frequencies. This treatment yields an expected MiSeq base-calling error rate of approximately 1 in 1,000. Aligned sequences in which the read and reference sequence contained no gaps are stored in an alignment table from which base frequencies were tabulated for each locus. Indel frequencies were quantified with a custom Matlab script.

[0416] Sequencing reads are scanned for exact matches to two 10-bp sequences that flank both sides of a window in which indels might occur. If no exact matches were located, the read is excluded from analysis. If the length of this indel window exactly matched the reference sequence the read is classified as not containing an indel. If the indel window is two or more bases longer or shorter than the reference sequence, then the sequencing read is classified as an insertion or deletion, respectively.

### Example 9—Mouse Editing Experiments (Prophetic)

[0417] It is envisaged that a base editor comprising a novel DNA targeting nuclease domain fused to a novel deaminase domain can be validated as a therapeutic candidate by testing in appropriate mouse models of disease.

[0418] One example of an appropriate model comprises mice that have been engineered to express the human PCSK9 protein, for example, as described by Herbert et al (10.1161/ATVBAHA.110.204040). The PCSK9 protein regulates LDL receptor (LDLR) levels and influences serum cholesterol levels. Mice expressing the human PCSK9 protein exhibit elevated levels of cholesterol and more rapid development of atherosclerosis. PCSK9 is a validated drug target for the reduction of lipid levels in people at increased risk of cardiovascular disease due abnormally high plasma lipid levels (https://doi.org/10.1038/s41569-018-0107-8). Reducing the levels of PCSK9 via genome editing is expected to permanently lower lipid levels for the life-time of the individual thus providing a life-long reduction in cardiovascular disease risk. One genome editing approach can involve targeting the coding sequence of the PCSK9 gene with the goal of editing a sequence to create a premature stop codon and thus prevent the translation of the PCSK9 mRNA into a functional protein. Targeting a region close to the 5′ end of the coding sequence is useful in order to block translation of the majority of the protein. To create a stop codon (TGA, TAA, TAG) with high efficiency and specificity will require targeting a region of the PCSK9 coding sequence wherein the editing window will be placed over an appropriate sequence such that the highest frequency editing event results in a stop codon. Therefore, the availability of multiple base editing systems with a wide range of PAMs or a base editing system with a degenerate PAM is useful to access a larger number of potential target sites in the PCSK9 gene. In addition, additional editing systems wherein the frequency of off-target editing is low (e.g. in the range of 1% or less of the on-target editing events) are also useful to perform gene editing in this context.

[0419] The efficiency of base editing required for a therapeutic effect is in the range of 50% or higher in order to achieve a significant reduction in plasma lipid levels. An example of the use of a base editor to create a stop codon in the PCSK9 gene is that of Carreras et al (https://doi.org/10.1186/s12915-018-0624-2) in which between 10% and 34% of the PCSK9 alleles were edited to create a stop codon. While this level of editing was sufficient to result in a measurable reduction in plasma lipid levels in the mice, a higher editing efficiency will be required for therapeutic use in humans.

[0420] To identify a base-editing (BE) system and a guide that are optimal for introducing the stop codons in the PCSK9 gene, a screen may be performed in a mouse liver cell line such as Hepa1-6 cells. In silico screening may first be used to identify guides that target the PCSK9 gene with the various BE systems available. To select among the large number of possible guides an in-silico analysis may be performed to determine which guides have an editing window that encompasses a sequence that when edited may create a stop codon. Preference may then be given to those guides that are closer to the 5′ end of the coding sequence. The resulting set of guides and BE proteins may be combined to form a ribonucleoprotein complex (RNP) and may be nucleofected into Hepa1-6 cells. After 72 h the efficiency of editing at the target site may be determined by NGS analysis. Based on these in vitro results the one or more BE/guide combinations that resulted in the highest frequency of stop codon formation may be selected for in vivo testing.

[0421] For application in a human therapeutic setting a safe and effective method of delivering the base editing components comprising the base editor and the guide RNA is required. In vivo delivery methods can be divided in to viral or non-viral methods. Among viral vectors the Adeno Associated Virus (AAV) is the virus of choice for clinical use due to its safety record, efficient delivery to multiple tissues and cell types and established manufacturing processes. The large size of base editors (BE) exceeds the packaging capacity of AAV which interferes with packaging in a single Adeno Associated Virus. While approaches that package BE into two AAV using split intein technology have been demonstrated to be successful in mice (https://doi.org/10.1038/s41551-019-0501-5), the requirement for 2 viruses can complicate development and manufacture. An additional disadvantage of AAV is that while the virus does not have a mechanism for promoting integration into the genome of host cells, and most of the AAV genomes remain episomal, a fraction of the AAV genomes do become integrated at random double strand breaks that occur naturally in cells (Curr Opin Mol Ther. 2009 August; 11(4): 442-447). This may lead to the persistence of gene sequences expressing the BE for the life-time of the organism. Moreover, AAV genomes persist as episomes inside the nucleus of transduced cells and can be maintained for years which may result in the long-term expression of BE in these cells and thus an increased risk of off-target effects because the risk of an off-target event occurring is a function of the time over which the editing enzyme is active. Adenovirus (Ad) such as Ad5 can efficiently deliver DNA payloads to the liver of mammals and can package up to 45 kb of DNA. However, adenoviruses are understood to induce a strong immune response in mammals (http://dx.doi.org/10.1136/gut.48.5.733), including in patients which can result in serious adverse events including death (https://doi.org/10.1016/j.ymthe.2020.02.010).

[0422] Non-viral delivery vectors (reviewed in doi:10.1038/mt.2012.79) which include lipid nanoparticles and polymeric nanoparticles have several advantages compared to viral delivery vectors including lower immunogenicity and transient expression of the nucleic acid cargo. The transient expression elicited by non-viral delivery vectors is particularly suited to genome editing applications because it is expected to minimize off target events. In addition, non-viral delivery unlike viral vectors has the potential for repeat administration to achieve the therapeutic effect. There is also no theoretical limit to the size of the nucleic acid molecules that can be packaged in non-viral vectors, although in practice the packaging becomes less efficient as the size of the nucleic acid increases and the particles size may increase.

[0423] A BE may be delivered in vivo using a non-viral vector such as a lipid nanoparticle (LNP) by encapsulating a synthetic mRNA encoding the BE together with the guide RNA into the LNP. This can be performed using any suitable methodology, for example as described by Finn et al (DOI: 10.1016/j.celrep.2018.02.014) or Yin et al (doi:10.1038/nbt.3471). LNP can deliver their cargo with a bias to the hepatocytes of the liver, which is also a target organ/cell type when attempting to interfere with the expression of the PCSK9 gene. In order to demonstrate proof of concept for this approach we envisage that a BE comprised of a novel genome editing protein fused to a deaminase domain may be encoded in a synthetic mRNA and packaged in a LNP together with an appropriate guide RNA that targets the selected site in the PCSK9 gene of the mouse. In the case of mice that were engineered to express the human PCSK9 gene the guide may be designed to target selectively the human PCSK9 gene or both the human and mouse PCSK9 genes. Following injection of these LNP the editing efficiency at the on-target site in the genome of the liver cells may be analyzed by amplicon sequencing or other methods such as tracking of indels by decomposition (doi: 10.1093/nar/gku936). The physiologic impact may be determined by measuring lipid levels in the blood of the mice, including total cholesterol and triglyceride levels using standard methods.

[0424] Another example of a disease that may be modeled in mice to evaluate a novel BE is Primary Hyperoxaluria type I. Primary Hyperoxaluria type I (PH1) is a rare autosomal recessive disease caused by defects in the AGXT gene that encodes the enzyme alanine-glyoxylate aminotransferase. This results in a defect in glyoxylate metabolism and the accumulation of the toxic metabolite oxalate. One approach to treating this disease is to reduce the expression of the enzyme glycolate oxidase (GO) that produces glyoxylate from glycolate and thereby reducing the amount of substrate (glyoxylate) available for the formation of oxalate. PH1 can be modeled in mice in which both copies of the AGXT gene have been knocked out (agxt−/− mice) resulting in a significant 3-fold increase in oxalate levels in the urine compared to wild type controls. The agxt−/− mice can therefore be used to assess the efficacy of a novel base editor designed to create a stop codon in the coding sequence of the endogenous mouse GO gene. To identify a BE system and a guide that is optimal for introducing stop codons in the GO gene, a screen may be performed in a mouse liver cell line such as Hepa1-6 cells. In silico screening may first be used to identify guides that target the GO gene with the various BE systems available. To select among the large number of possible guides an in-silico analysis may be performed to determine which guides have an editing window that encompasses a sequence that when edited may create a stop codon. In some instances, guides closer to the 5′ end of the coding sequence may be utilized. The resulting set of guides and BE proteins may be combined to form a ribonucleoprotein complex (RNP) and may be nucleofected in to Hepa1-6 cells. After 72 h, the efficiency of editing at the target site may be determined by NGS analysis. Based on these in vitro results the one or more BE/guide combinations that resulted in the highest frequency of stop codon formation may be selected for in vivo testing in mice.

[0425] The BE and guide may be delivered to the mice using an AAV virus with a split intein system to express the BE and a 3rd AAV to deliver the guide. Alternatively, an Adenovirus type 5 may be used to deliver the BE and guide in a single virus because of the >40 Kb packaging capacity of Adenovirus. Further, the BE may be delivered as a mRNA together with the guide RNA packaged in an appropriate LNP. After intravenous injection of the LNP into the agxt−/− mice the oxalate levels in the urine may be monitored over time to determine if oxalate levels were reduced which may indicate that the BE was active and had the expected therapeutic effect. To determine if the BE had introduced the stop codons, the appropriate region of the GO gene can be PCR amplified from the genomic DNA extracted from livers of treated and control mice. The resultant PCR product can be sequenced using Next Generation Sequencing to determine the frequency of the sequence changes.

### Example 10—Gene Discovery of New Deaminases

[0426] 4 Tbp (tera base pairs) of proprietary and public assembled metagenomic sequencing data from diverse environments (soil, sediments, groundwater, thermophilic, human, and non-human microbiomes) were mined to discover novel deaminases. HMM profiles of documented deaminases were built and searched against all predicted proteins using HMMER3 (hmmer.org) to identify deaminases from our databases. Predicted and reference (e.g., eukaryotic APOBEC1, bacterial TadA) deaminases were aligned with MAFFT and a phylogenetic tree was inferred using FastTree2. Novel families and subfamilies were defined by identifying clades composed of sequences disclosed herein. Candidates were selected based on the presence of critical catalytic residues indicative of enzymatic function (see e.g. SEQ ID NOs: 1-51, 385-386, 387-443, 444-447, 488-475, 599-675, 744-835, or 970-982).

### Example 11—Plasmid Construction

[0427] DNA fragments of genes were synthesized at either Twist Bioscience or Integrated DNA Technologies (IDT). Plasmid DNA was amplified in Endura electrocompetent cells (Lucigen) and isolated by QIAprep Spin Miniprep Kit (Qiagen). Vector backbones were prepared by restriction enzyme digestion of plasmids. Inserts were amplified by Q5 High-Fidelity DNA polymerase (New England Biolabs) using primers (SEQ ID NOs: 690-707) ordered either from Elim BIOPHARM or IDT. Both vector backbones and inserts were purified by gel extraction using the Gel DNA Recovery Kit (Zymo Research). One or multiple DNA fragments were assembled into the vectors through NEBuilder HiFi DNA assembly (New England Biolabs) (SEQ ID NOs. 483-487, 720-726, or 737-738).

### Example 12—Assessment of Base Edit Efficiency in E. coli by Sequencing

[0428] 5 ng extracted DNA prepared as in Example 4 was used as the template and primers (P137 and P360) were used for PCR amplification, and the resulting products were submitted for Sanger sequencing at ELIM BIOPHARM. Primers used for sequencing are shown in Tables 6 and 7 (Seq ID NOs. 523-531).

TABLE 6
Primers used for base editing analysis of lacZ gene in E. coli

| | SEQ | | |
|---|---|---|---|
| Name | ID NO. | Description | Sequence (5′→3′) |
| P137 | 523 | Forward primer used to amplify | CCAGGCTTTACACTTTATGCT |
| | | lacZ | |
| P360 | 524 | Reverse primer used to amplify | CGAACATCCAAAAGTTTGTGTTTTT |
| | | lacZ | |
| P137 | 523 | Sanger sequencing primer of | CCAGGCTTTACACTTTATGCT |
| | | MGA1-4_site 1 | |
| P137 | 523 | Sanger sequencing primer of | CCAGGCTTTACACTTTATGCT |
| | | MGA1-4_site 2 | |
| P361 | 528 | Sanger sequencing primer of | TGAGCGCATTTTTACGCGC |
| | | MGA1-4_site 3 | |
| P361 | 528 | Sanger sequencing primer of | TGAGCGCATTTTTACGCGC |
| | | MGA1-6_site 1 | |
| P361 | 528 | Sanger sequencing primer of | TGAGCGCATTTTTACGCGC |
| | | MGA1-6_site 2 | |
| P361 | 528 | Sanger sequencing primer of | TGAGCGCATTTTTACGCGC |
| | | MGA1-6_site 3 | |
| P361 | 528 | Sanger sequencing primer of | TGAGCGCATTTTTACGCGC |
| | | MGA3-6_site 1 | |
| P363 | 529 | Sanger sequencing primer of | GAAAACGGCAACCCGTGG |
| | | MGA3-6_site 2 | |
| P360 | 524 | Sanger sequencing primer of | CGAACATCCAAAAGTTTGTGTTTTT |
| | | MGA3-6_site 3 | |
| P137 | 523 | Sanger sequencing primer of | CCAGGCTTTACACTTTATGCT |
| | | MGA3-7_site 1 | |
| P361 | 528 | Sanger sequencing primer of | TGAGCGCATTTTTACGCGC |
| | | MGA3-7_site 2 | |
| P361 | 528 | Sanger sequencing primer of | TGAGCGCATTTTTACGCGC |
| | | MGA3-7_site 3 | |
| P137 | 523 | Sanger sequencing primer of | CCAGGCTTTACACTTTATGCT |
| | | MGA3-8_site 1 | |
| P361 | 528 | Sanger sequencing primer of | TGAGCGCATTTTTACGCGC |
| | | MGA3-8_site 2 | |
| P363 | 529 | Sanger sequencing primer of | GAAAACGGCAACCCGTGG |
| | | MGA3-8_site 3 | |
| P139 | 526 | Sanger sequencing primer of | GTATGTGGTGGATGAAGCC |
| | | MGA4-2_site 1 | |
| P363 | 529 | Sanger sequencing primer of | GAAAACGGCAACCCGTGG |
| | | MGA4-2_site 2 | |
| P360 | 524 | Sanger sequencing primer of | CGAACATCCAAAAGTTTGTGTTTTT |
| | | MGA4-2_site 3 | |
| P361 | 528 | Sanger sequencing primer of | TGAGCGCATTTTTACGCGC |
| | | MGA4-5 Site 1 | |
| P361 | 528 | Sanger sequencing primer of | TGAGCGCATTTTTACGCGC |
| | | MGA4-5 Site 2 | |
| P461 | 530 | Sanger sequencing primer of | GGATTGAAAATGGTCTGCTG |
| | | MGA4-5_Site 3 | |
| P137 | 523 | Sanger sequencing primer of | CCAGGCTTTACACTTTATGCT |
| | | MGA7-1_site 1 | |
| P361 | 528 | Sanger sequencing primer of | TGAGCGCATTTTTACGCGC |
| | | MGA7-1_site 2 | |
| P461 | 530 | Sanger sequencing primer of | GGATTGAAAATGGTCTGCTG |
| | | MGA7-1_site 3 | |
| P139 | 526 | Sanger sequencing primer of | GTATGTGGTGGATGAAGCC |
| | | MGA14-1_site 1 | |
| P363 | 529 | Sanger sequencing primer of | GAAAACGGCAACCCGTGG |
| | | MGA14-1_site 2 | |
| P360 | 524 | Sanger sequencing primer of | CGAACATCCAAAAGTTTGTGTTTTT |
| | | MGA14-1_site 3 | |
| P137 | 523 | Sanger sequencing primer of | CCAGGCTTTACACTTTATGCT |
| | | MGA15-1_site 1 | |
| P361 | 528 | Sanger sequencing primer of | TGAGCGCATTTTTACGCGC |
| | | MGA15-1_site 2 | |
| P140 | 527 | Sanger sequencing primer of | TTGTGGAGCGACATCCAG |
| | | MGA15-1_site 3 | |
| P137 | 523 | Sanger sequencing primer of | CCAGGCTTTACACTTTATGCT |
| | | MGA16-1_site 1 | |
| P361 | 528 | Sanger sequencing primer of | TGAGCGCATTTTTACGCGC |
| | | MGA16-1_site 2 | |
| P361 | 528 | Sanger sequencing primer of | TGAGCGCATTTTTACGCGC |
| | | MGA16-1_site 3 | |
| P361 | 528 | Sanger sequencing primer of | TGAGCGCATTTTTACGCGC |
| | | MGA18-1_site 1 | |
| P363 | 529 | Sanger sequencing primer of | GAAAACGGCAACCCGTGG |
| | | MGA18-1_site 2 | |
| P462 | 531 | Sanger sequencing primer of | ACTGCTGACGCCGCTGCG |
| | | MGA18-1_site 3 | |
| P363 | 529 | Sanger sequencing primer of | GAAAACGGCAACCCGTGG |
| | | ABE8.17_site 1 | |
| P137 | 523 | Sanger sequencing primer of | CCAGGCTTTACACTTTATGCT |
| | | ABE8.17_site 2 | |
| P139 | 526 | Sanger sequencing primer of | GTATGTGGTGGATGAAGCC |
| | | ABE8.17_site 3 | |
| P137 | 523 | Sanger sequencing primer of | CCAGGCTTTACACTTTATGCT |
| | | MGC1-4_site 1 | |
| P137 | 523 | Sanger sequencing primer of | CCAGGCTTTACACTTTATGCT |
| | | MGC1-4_site 2 | |
| P361 | 528 | Sanger sequencing primer of | TGAGCGCATTTTTACGCGC |
| | | MGC1-4_site 3 | |
| P137 | 523 | Sanger sequencing primer of | CCAGGCTTTACACTTTATGCT |
| | | MGC1-6_site 1 | |
| P137 | 523 | Sanger sequencing primer of | CCAGGCTTTACACTTTATGCT |
| | | MGC1-6_site 2 | |
| P361 | 528 | Sanger sequencing primer of | TGAGCGCATTTTTACGCGC |
| | | MGC1-6_site 3 | |
| P138 | 525 | Sanger sequencing primer of | CCGAAAGGCGCGGTGCCG |
| | | MGC3-6_site 1 | |
| P361 | 528 | Sanger sequencing primer of | TGAGCGCATTTTTACGCGC |
| | | MGC3-6_site 2 | |
| P360 | 524 | Sanger sequencing primer of | CGAACATCCAAAAGTTTGTGTTTTT |
| | | MGC3-6_site 3 | |
| P137 | 523 | Sanger sequencing primer of | CCAGGCTTTACACTTTATGCT |
| | | MGC3-7_site 1 | |
| P137 | 523 | Sanger sequencing primer of | CCAGGCTTTACACTTTATGCT |
| | | MGC3-7_site 2 | |
| P137 | 523 | Sanger sequencing primer of | CCAGGCTTTACACTTTATGCT |
| | | MGC3-7_site 3 | |
| P137 | 523 | Sanger sequencing primer of | CCAGGCTTTACACTTTATGCT |
| | | MGC3-8_site 1 | |
| P361 | 528 | Sanger sequencing primer of | TGAGCGCATTTTTACGCGC |
| | | MGC3-8_site 2 | |
| P361 | 528 | Sanger sequencing primer of | TGAGCGCATTTTTACGCGC |
| | | MGC3-8_site 3 | |
| P361 | 528 | Sanger sequencing primer of | TGAGCGCATTTTTACGCGC |
| | | MGC4-2_site 1 | |
| P139 | 526 | Sanger sequencing primer of | GTATGTGGTGGATGAAGCC |
| | | MGC4-2_site 2 | |
| P363 | 529 | Sanger sequencing primer of | GAAAACGGCAACCCGTGG |
| | | MGC4-2_site 3 | |
| P137 | 523 | Sanger sequencing primer of | CCAGGCTTTACACTTTATGCT |
| | | MGC4-5_site 1 | |
| P361 | 528 | Sanger sequencing primer of | TGAGCGCATTTTTACGCGC |
| | | MGC4-5_site 2 | |
| P139 | 526 | Sanger sequencing primer of | GTATGTGGTGGATGAAGCC |
| | | MGC4-5_site 3 | |
| P361 | 528 | Sanger sequencing primer of | TGAGCGCATTTTTACGCGC |
| | | MGC7-1_site 1 | |
| P461 | 530 | Sanger sequencing primer of | GGATTGAAAATGGTCTGCTG |
| | | MGC7-1_site 2 | |
| P139 | 526 | Sanger sequencing primer of | GTATGTGGTGGATGAAGCC |
| | | MGC7-1_site 3 | |
| P137 | 523 | Sanger sequencing primer of | CCAGGCTTTACACTTTATGCT |
| | | MGC14-1_site 1 | |
| P139 | 526 | Sanger sequencing primer of | GTATGTGGTGGATGAAGCC |
| | | MGC14-1_site 2 | |
| P139 | 526 | Sanger sequencing primer of | GTATGTGGTGGATGAAGCC |
| | | MGC14-1_site 3 | |
| P361 | 528 | Sanger sequencing primer of | TGAGCGCATTTTTACGCGC |
| | | MGC15-1_site 1 | |
| P461 | 530 | Sanger sequencing primer of | GGATTGAAAATGGTCTGCTG |
| | | MGC15-1_site 2 | |
| P139 | 526 | Sanger sequencing primer of | GTATGTGGTGGATGAAGCC |
| | | MGC15-1_site 3 | |
| P137 | 523 | Sanger sequencing primer of | CCAGGCTTTACACTTTATGCT |
| | | MGC16-1_site 1 | |
| P137 | 523 | Sanger sequencing primer of | CCAGGCTTTACACTTTATGCT |
| | | MGC16-1_site 2 | |
| P361 | 528 | Sanger sequencing primer of | TGAGCGCATTTTTACGCGC |
| | | MGC16-1_site 3 | |
| P361 | 528 | Sanger sequencing primer of | TGAGCGCATTTTTACGCGC |
| | | MGC18-1_site 1 | |
| P139 | 526 | Sanger sequencing primer of | GTATGTGGTGGATGAAGCC |
| | | MGC18-1_site 2 | |
| P363 | 529 | Sanger sequencing primer of | GAAAACGGCAACCCGTGG |
| | | MGC18-1_site 3 | |
| P363 | 529 | Sanger sequencing primer of | GAAAACGGCAACCCGTGG |
| | | BE3_site 1 | |
| P360 | 524 | Sanger sequencing primer of | CGAACATCCAAAAGTTTGTGTTTTT |
| | | BE3_site 2 | |
| P137 | 523 | Sanger sequencing primer of | CCAGGCTTTACACTTTATGCT |
| | | BE3_site 3 | |

TABLE 7
Primers used for base editing analysis of the effect of uracil glycosylase
inhibitor (UGI) in E. coli

| | SEQ | | |
|---|---|---|---|
| Name | ID NO. | Description | Sequence (5′→3′) |
| P137 | 523 | Forward primer used to amplify | CCAGGCTTTACACTTTATGCT |
| | | lacZ | |
| P360 | 524 | Reverse primer used to amplify | CGAACATCCAAAAGTTTGTGTTTTT |
| | | lacZ | |
| P461 | 530 | Sanger sequencing primer of lacZ | GGATTGAAAATGGTCTGCTG |
| | | site | |

[0429] FIGS. 8A-8C shows example base edits by enzymes interrogated by this experiment, as assessed by Sanger sequencing.

[0430] FIGS. 10A-10B shows base editing efficiencies of adenine base editors (ABEs) using TadA (ABE8.17m) (SEQ ID NO: 596) and MG nickases according to Table 3. TadA is a tRNA adenine deaminase; TadA (ABE8.17m) is an engineered variant of E. coli TadA. Twelve MG nickases fused with TadA (ABE8.17m) were constructed and tested in E. coli. Three guides were designed to target lacZ. Numbers shown in boxes indicate percentages of A to G conversion quantified by Edit R at each position. ABE8.17m was used as the positive control for the experiment.

[0431] FIGS. 11A-11B shows base editing efficiencies of cytosine base editors (CBEs) comprising rat APOBEC1, MG nickases, and uracil glycosylase inhibitor of Bacillus subtilis bacteriophage (UGI (PBS1)). APOBEC1 is a cytosine deaminase. 12_MG nickases fused with rAPOBEC1 on N-terminus and UGI on C-terminus were constructed and tested in E. coli. Three guides were designed to target lacZ. Numbers shown in boxes indicate percentages of C to T conversion quantified by Edit R. BE3 was used as the positive control in the experiment.

[0432] FIGS. 12A-B show effects of MG uracil glycosylase inhibitors (UGIs) on base editing activity when added to CBEs. FIG. 12A shows MGC15-1 comprises of N-terminal APOBEC1, MG15-1 nickase, and C-terminal UGI. Three MG UGIs were tested for improvements of cytosine base editing activities in E. coli. (b) BE3 comprises N-terminal rAPOBEC1, SpCas9 nickase, and C-terminal UGI. Two MG UGIs were tested for improvements of cytosine base editing activities in HEK293T cells. Editing efficiencies were quantified by Edit R.

### Example 13—Cell Culture, Transfections, Next Generation Sequencing, and Base Edit Analysis

[0433] HEK293T cells were grown and passaged in Dulbecco's Modified Eagle's Medium plus GlutaMAX (Gibco) supplemented with 100 (v/v) fetal bovine serum (Gibco) at 37° C. with 50 CO₂, 5×10⁴ cells were seeded on 96-well cell culture plates treated for cell attachment (Costar), grown for 20 to 24 h, and the spent media were refreshed with new media right before tranfection. 200 ng expression plasmid and 1 μL lipofectamine 2000 (ThermoFisher Scientific) were used for tranfection per well per manufacturer's instructions. Transfected cells were grown for 3 days, harvested, and gDNA was extracted with QuickExtract (Lucigen) per manufacturer's instructions. Targeted regions for base edits were amplified using Q5 High-Fidelity DNA polymerase (New England Biolabs) with primers listed in Tables 8 and 9 (SEQ ID NOs. 538-585) and extracted DNA as the templates.

TABLE 8
Primers used for base edit analysis of the effect of UGI in HEK293T

| | SEQ | | |
|---|---|---|---|
| Name | ID NO. | Description | Sequence (5′→3′) |
| P577 | 536 | Forward primer used to amplify the | GAGGCTGGAGAGGCCCGT |
| | | targeted region | |
| P578 | 537 | Reverse primer used to amplify the | GATTTTCATGCAGGTGCTGAAA |
| | | targeted region | |
| P577 | 536 | Sanger sequencing primer | GAGGCTGGAGAGGCCCGT |

TABLE 9a
Primers used to amplify targeted regions in HEK293T cells transfected with
A0A2K5RND7-MG nickase-MG69-1

| | SEQ | | |
|---|---|---|---|
| Name | ID NO. | Description | Sequence (5′→3′) |
| P969 | 538 | Forward primer used to amplify | GCTCTTCCGATCTNNNNNAGGAG |
| | | A0A2K5RDN7-nSpCas9 (D10A)- | GAAGGGCCTGAGT |
| | | MG69-1_site 1 | |
| P970 | 539 | Reverse primer used to amplify | GCTCTTCCGATCTNNNNNTCTGC |
| | | A0A2K5RDN7-nSpCas9 (D10A)- | CCTCGTGGGTTTG |
| | | MG69-1_site 1 | |
| P971 | 540 | Forward primer used to amplify | GCTCTTCCGATCTNNNNNCTCTG |
| | | A0A2K5RDN7-nSpCas9 (D10A)- | GCCACTCCCTGGC |
| | | MG69-1_site 2 | |
| P972 | 541 | Reverse primer used to amplify | GCTCTTCCGATCTNNNNNGGCAG |
| | | A0A2K5RDN7-nSpCas9 (D10A)- | GCTCTCCGAGGAG |
| | | MG69-1_site 2 | |
| P973 | 542 | Forward primer used to amplify | GCTCTTCCGATCTNNNNNGGGAA |
| | | A0A2K5RDN7-nSpCas9 (D10A)- | TAATAAAAGTCTCTCTCTTAA |
| | | MG69-1_site 3 | |
| P974 | 543 | Reverse primer used to amplify | GCTCTTCCGATCTNNNNNCCCCC |
| | | A0A2K5RDN7-nSpCas9 (D10A)- | TCCACCAGTACCC |
| | | MG69-1_site 3 | |
| P975 | 544 | Forward primer used to amplify | GCTCTTCCGATCTNNNNNCCTGT |
| | | A0A2K5RDN7-nSpCas9 (D10A)- | CCTTGGAGAACCG |
| | | MG69-1_site 4 | |
| P976 | 545 | Reverse primer used to amplify | GCTCTTCCGATCTNNNNNGCAGG |
| | | A0A2K5RDN7-nSpCas9 (D10A)- | TGAACACAAGAGCT |
| | | MG69-1_site 4 | |
| P977 | 546 | Forward primer used to amplify | GCTCTTCCGATCTNNNNNGAAGG |
| | | A0A2K5RDN7-nSpCas9 (D10A)- | TGTGGTTCCAGAAC |
| | | MG69-1_site 5 | |
| P978 | 547 | Reverse primer used to amplify | GCTCTTCCGATCTNNNNNTCGAT |
| | | A0A2K5RDN7-nSpCas9 (D10A)- | GTCCTCCCCATTG |
| | | MG69-1_site 5 | |
| P979 | 548 | Forward primer used to amplify | GCTCTTCCGATCTNNNNNAAACA |
| | | A0A2K5RDN7-nMG1-4 (D9A)- | GGCTAGACATAGGGA |
| | | MG69-1_site 1 | |
| P980 | 549 | Reverse primer used to amplify | GCTCTTCCGATCTNNNNNGAAGC |
| | | A0A2K5RDN7-nMG1-4 (D9A)- | CACCAGAGTCTCTA |
| | | MG69-1_site 1 | |
| P981 | 550 | Forward primer used to amplify | GCTCTTCCGATCTNNNNNGCCGC |
| | | A0A2K5RDN7-nMG1-4 (D9A)- | CATTGACAGAGGG |
| | | MG69-1_site 2 | |
| P982 | 551 | Reverse primer used to amplify | GCTCTTCCGATCTNNNNNGCATC |
| | | A0A2K5RDN7-nMG1-4 (D9A)- | AAAACAAAAGGGAGATTG |
| | | MG69-1_site 2 | |
| P983 | 552 | Forward primer used to amplify | GCTCTTCCGATCTNNNNNCCTCT |
| | | A0A2K5RDN7-nMG1-4 (D9A)- | GCCCACCTCACTT |
| | | MG69-1_site 3 | |
| P984 | 553 | Reverse primer used to amplify | GCTCTTCCGATCTNNNNNGCCAT |
| | | A0A2K5RDN7-nMG1-4 (D9A)- | GTGGGTTAATCTGG |
| | | MG69-1_site 3 | |
| P985 | 554 | Forward primer used to amplify | GCTCTTCCGATCTNNNNNCCGGA |
| | | A0A2K5RDN7-nMG1-4 (D9A)- | CGCACCTACCCAT |
| | | MG69-1_site 4 | |
| P986 | 555 | Reverse primer used to amplify | GCTCTTCCGATCTNNNNNCTAGA |
| | | A0A2K5RDN7-nMG1-4 (D9A)- | TGGGAATGGATGGG |
| | | MG69-1_site 4 | |
| P987 | 556 | Forward primer used to amplify | GCTCTTCCGATCTNNNNNAACCA |
| | | A0A2K5RDN7-nMG3-6 (D13A)- | CAAACCCACGAGG |
| | | MG69-1_site 1 | |
| P988 | 557 | Reverse primer used to amplify | GCTCTTCCGATCTNNNNNTCAAT |
| | | A0A2K5RDN7-nMG3-6 (D13A)- | GGCGGCCCCGGGC |
| | | MG69-1_site 1 | |
| P989 | 558 | Forward primer used to amplify | GCTCTTCCGATCTNNNNNAGTGA |
| | | A0A2K5RDN7-nMG3-6 (D13A)- | TCCCCAGTGTCCC |
| | | MG69-1_site 2 | |
| P990 | 559 | Reverse primer used to amplify | GCTCTTCCGATCTNNNNNGCCCT |
| | | A0A2K5RDN7-nMG3-6 (D13A)- | GAACGCGTTTGCT |
| | | MG69-1_site 2 | |
| P991 | 560 | Forward primer used to amplify | GCTCTTCCGATCTNNNNNTGGGA |
| | | A0A2K5RDN7-nMG3-6 (D13A)- | ATAATAAAAGTCTCTCTCT |
| | | MG69-1_site 3 | |
| P992 | 561 | Reverse primer used to amplify | GCTCTTCCGATCTNNNNNCCCCT |
| | | A0A2K5RDN7-nMG3-6 (D13A)- | CCACCAGTACCCC |
| | | MG69-1_site 3 | |
| P993 | 562 | Forward primer used to amplify | GCTCTTCCGATCTNNNNNCAGGG |
| | | A0A2K5RDN7-nMG3-6 (D13A)- | CCTCCTCAGCCCA |
| | | MG69-1_site 4 | |
| P994 | 563 | Reverse primer used to amplify | GCTCTTCCGATCTNNNNNGTCTG |
| | | A0A2K5RDN7-nMG3-6 (D13A)- | GATGTCGTAAGGGAA |
| | | MG69-1_site 4 | |
| P995 | 564 | Forward primer used to amplify | GCTCTTCCGATCTNNNNNGGGGT |
| | | A0A2K5RDN7-nMG3-6 (D13A)- | GTAACTCAGAATGTTTT |
| | | MG69-1_site 5 | |
| P996 | 565 | Reverse primer used to amplify | GCTCTTCCGATCTNNNNNGGGAG |
| | | A0A2K5RDN7-nMG3-6 (D13A)- | TGAGACTCAGAGA |
| | | MG69-1_site 5 | |
| P997 | 566 | Forward primer used to amplify | GCTCTTCCGATCTNNNNNGCAAA |
| | | A0A2K5RDN7-nMG3-6 (D13A)- | GAGGGAAATGAGATCA |
| | | MG69-1_site 6 | |
| P998 | 567 | Reverse primer used to amplify | GCTCTTCCGATCTNNNNNGTGAC |
| | | A0A2K5RDN7-nMG3-6 (D13A)- | ACATTTGTTTGAGAATCA |
| | | MG69-1_site 6 | |
| P999 | 568 | Forward primer used to amplify | GCTCTTCCGATCTNNNNNCTTTA |
| | | A0A2K5RDN7-nMG3-6 (D13A)- | TCCCCGCACAGAG |
| | | MG69-1_site 7 | |
| P1000 | 569 | Reverse primer used to amplify | GCTCTTCCGATCTNNNNNCTTGG |
| | | A0A2K5RDN7-nMG3-6 (D13A)- | CCCATGGGAAATC |
| | | MG69-1_site 7 | |
| P1001 | 570 | Forward primer used to amplify | GCTCTTCCGATCTNNNNNGTCCC |
| | | A0A2K5RDN7-nMG4-2 (D28A)- | ATCCCAACACCCC |
| | | MG69-1_site 1 | |
| P1002 | 571 | Reverse primer used to amplify | GCTCTTCCGATCTNNNNNTGGGC |
| | | A0A2K5RDN7-nMG4-2 (D28A)- | ATGTGTGCTCCCA |
| | | MG69-1_site 1 | |
| P1003 | 572 | Forward primer used to amplify | GCTCTTCCGATCTNNNNNCTATG |
| | | A0A2K5RDN7-nMG4-2 (D28A)- | GGAATAATAAAAGTCTCTC |
| | | MG69-1_site 2 | |
| P1004 | 573 | Reverse primer used to amplify | GCTCTTCCGATCTNNNNNCTCCA |
| | | A0A2K5RDN7-nMG4-2 (D28A)- | CCAGTACCCCACC |
| | | MG69-1_site 2 | |
| P1005 | 574 | Forward primer used to amplify | GCTCTTCCGATCTNNNNNGGACC |
| | | A0A2K5RDN7-nMG4-2 (D28A)- | CTGGTCTCTACCT |
| | | MG69-1_site 3 | |
| P1006 | 575 | Reverse primer used to amplify | GCTCTTCCGATCTNNNNNCCTCT |
| | | A0A2K5RDN7-nMG4-2 (D28A)- | CCCATTGAACTACC |
| | | MG69-1_site 3 | |
| P1007 | 576 | Forward primer used to amplify | GCTCTTCCGATCTNNNNNCCCCA |
| | | A0A2K5RDN7-nMG4-2 (D28A)- | GTGACTCAGGGCC |
| | | MG69-1_site 4 | |
| P1008 | 577 | Reverse primer used to amplify | GCTCTTCCGATCTNNNNNTCGTA |
| | | A0A2K5RDN7-nMG4-2 (D28A)- | AGGGAAAGACTTAGGAA |
| | | MG69-1_site 4 | |
| P1009 | 578 | Forward primer used to amplify | GCTCTTCCGATCTNNNNNTCTCC |
| | | A0A2K5RDN7-nMG18-1 (D12A)- | CTTTTGTTTTGATGCATTT |
| | | MG69-1_site 1 | |
| P1010 | 579 | Reverse primer used to amplify | GCTCTTCCGATCTNNNNNCCACC |
| | | A0A2K5RDN7-nMG18-1 (D12A)- | CCAGGCTCTGGGG |
| | | MG69-1_site 1 | |
| P1011 | 580 | Forward primer used to amplify | GCTCTTCCGATCTNNNNNCCTTT |
| | | A0A2K5RDN7-nMG18-1 (D12A)- | TGTTTTGATGCATTTCTGTTT |
| | | MG69-1_site 2 | |
| P1012 | 581 | Reverse primer used to amplify | GCTCTTCCGATCTNNNNNAATCT |
| | | A0A2K5RDN7-nMG18-1 (D12A)- | ACCACCCCAGGCT |
| | | MG69-1_site 2 | |
| P1013 | 582 | Forward primer used to amplify | GCTCTTCCGATCTNNNNNATCCC |
| | | A0A2K5RDN7-nMG18-1 (D12A)- | CAGTGTCCCCCTT |
| | | MG69-1_site 3 | |
| P1014 | 583 | Reverse primer used to amplify | GCTCTTCCGATCTNNNNNCCAGG |
| | | A0A2K5RDN7-nMG18-1 (D12A)- | CCCTGAACGCGTT |
| | | MG69-1_site 3 | |
| P1015 | 584 | Forward primer used to amplify | GCTCTTCCGATCTNNNNNAGGCC |
| | | A0A2K5RDN7-nMG18-1 (D12A)- | AGGCCTGCGGGGG |
| | | MG69-1_site 4 | |
| P1016 | 585 | Reverse primer used to amplify | GCTCTTCCGATCTNNNNNCCAAA |
| | | A0A2K5RDN7-nMG18-1 (D12A)- | AACTCCCAAATTAGCAAA |
| | | MG69-1_site 4 | |

[0434] PCR products were purified using the HighPrep PCR Clean-up System (MAGBIO) per manufacturer's instructions. The effect of uracil glycosylase inhibitor (UGI) on base editing of candidate enzymes was analyzed by submitting PCR products to Elim BIOPHARM for Sanger sequencing, and the efficiency was quantified by Edit R. To analyze base editing of A0A2K5RND7-MG nickase-MG69-1, adapters used for next generation sequencing (NGS) were appended to PCR products by subsequent PCR reactions using KAPA HiFi HotStart ReadyMix PCR Kit (Roche) and primers compatible with TruSeq DNA Library Prep Kits (illumina). DNA concentrations of the resulting products were quantified by TapeStation (Agilent), and samples were pooled together to prepare the library for NGS analysis. The resulting library was quantified by qPCR with Aria Real-time PCR System (Agilent) and high through sequencing was performed with an Illumina Miseq instrument per manufacturer's instructions. Sequencing data was analyzed for base edits by Cripresso2.

[0435] FIGS. 13A-13B shows maps of sites targeted by base editors showing base editing efficiencies of cytosine base editors comprising CMP/dCMP-type deaminase domain-containing protein (uniprot accession A0A2K5RDN7), MG nickases, and MG UGI. The constructs comprise N-terminal A0A2K5RDN7, MG nickases, and C-terminal MG69-1. For simplicity, the identities of MG nickases are shown in the figure. BE3 (APOBEC1) was used as a positive control for base editing. An empty vector was used for the negative control. Three independent experiments were performed on different days. Abbreviations: R, repeat; NEG, negative control.

TABLE 9b
Protein Domains used in constructs in Example 13

| | | | | Linker | | | Linker |
|---|---|---|---|---|---|---|---|
| | | | | (Deaminase- | | | (Nickase- |
| Candidate | Type | PAM | Deaminase | Nickase) | Nickase | UGI | UGI) |
| A0A2K5RDN7- | II | nnRGGnT | A0A2K5RDN7 | SGSETPGT | InMG3-6 (D13A) | MG69-1 | SGGSS |
| nMG3-6-MG69-1 | | Sequence | SEQ ID NO: 594 | SESATPES | SEQ ID NO: 71 | SEQ ID | |
| | | Number: | | | | NO: 52 | |
| | | A362 | | | | | |
| A0A2K5RDN7- | II | nRRR | A0A2K5RDN7 | SGSETPGT | nMG1-4 | MG69-1 | SGGSS |
| nMG1-4-MG69-1 | | Sequence | SEQ ID NO: 594 | SESATPES | SEQ ID NO: 70 | SEQ ID | |
| | | Number: | | | | NO: 52 | |
| | | A360 | | | | | |
| A0A2K5RDN7- | II | nRWART | A0A2K5RDN7 | SGSETPGT | nMG18-1 | MG69-1 | SGGSS |
| nMG18-1-MG69-1 | | Sequence | SEQ ID NO: 594 | SESATPES | SEQ ID NO: 78 | SEQ ID | |
| | | Number: | | | | NO: 52 | |
| | | A368 | | | | | |

### Example 14—Positive Selection of Base Editor Mutants in E. coli

[0436] FIGS. 14A-B show a positive selection method for TadA characterization in E. coli. FIG. 14A shows a map of one plasmid system used for TadA selection. The vector comprises CAT (H193Y), a sgRNA expression cassette targeting CAT, and an ABE expression cassette. In this figure, N-terminal TadA from E. coli and a C-terminal SpCas9 (D10A) from Streptococcus pyogenes are shown. FIG. 14B shows sequencing traces demonstrating that when introduced/transformed into E. coli cells, the A2 position of CAT (H193Y)'s template strand is edited, reverting the H193Y mutant to wild type and restoring its activity. Abbreviations: CAT, chloramphenicol acetyltransferase.

[0437] 1 μL of plasmid solution with a concentration of 10 ng/μL was transformed into 25 μL BL21 (DE3) electrocompetent cells (Lucigen), recovered with 975 μL expression recovery medium at 37° C. for 1 h. 50 μL of the resulting cells were spread on a LB agar plate containing 100 μg/mL carbenicillin, 0.1 mM IPTG, and appropriate amount of chloramphenicol. The plate was incubated at 37° C. until colonies were pickable. Colony PCR were used to amplify the genomic region containing base edits, and the resulting products were submitted for Sanger sequencing at ELIM BIOPHARM. Primers used for PCR and sequencing are listed in Table 10 (SEQ ID NOs. 532-537).

TABLE 10
Primers used for base edit analysis of CAT (H193Y)

| | SEQ | | |
|---|---|---|---|
| Name | ID NO. | Description | Sequence (5′→3′) |
| P570 | 532 | Forward primer used to amplify CAT | CCGCCGCCGCAAGGAATGGTTT |
| | | (H193Y) of CAT (H193Y)-sgRNA- | AATTAATTTGATCGGCACGTAAG |
| | | MG68-4 variant-nSpCas9 (D10A) | AGG |
| P1050 | 534 | Forward primer used to amplify CAT | AAGGAATGGTTTAATTAATTCTA |
| | | (H193Y) of CAT (H193Y)-sgRNA- | GATTAATTAATTTGATCGGCACG |
| | | MG68-4 variant-nMG34-1 (D10A) | TAAG |
| P571 | 533 | Reverse primer used to amplify CAT | GGACTGTTGGGCGCCATCTCCTT |
| | | (H193Y) of CAT (H193Y)-sgRNA- | GCATGCTTCACTTATTCAGGCGT |
| | | MG68-4 variant-nSpCas9 | AGCA |
| P571 | 535 | Sanger sequencing primer of CAT | GGACTGTTGGGCGCCATCTCCT |
| | | (H193Y) | TGCATGCTTCACTTATTCAGGCG |
| | | | TAGCA |

[0438] FIGS. 15A-B shows mutations caused by TadA enable high tolerance of chloramphenicol (Cm). FIG. 15A shows photographs of growth plates where different concentrations of chloramphenicol were used to select for antibiotics resistance of E. coli. In this example, wild type and two variants of TadA from E. coli (EcTadA) were tested. FIG. 15B shows a results summary table demonstrating that ABEs carrying mutated TadA show higher editing efficiencies than the wild type. In these experiments, colonies were picked from the plates with greater than or equal to 0.5 μg/mL Cm. For simplicity, identities of deaminases are shown in the table, but effectors (SpCas9) and construct organization are shown in the figures above.

[0439] FIGS. 16A-16B shows investigation of MG TadA activity in positive selection. FIG. 16A shows photographs of growth plates from an experiment where 8_MG68 TadA candidates were tested against 0 to 2 μg/mL of chloramphenicol (ABEs comprised N-terminal TadA variants and C-terminal SpCas9 (D10A) nickase). For simplicity, identities of deaminases are shown. Panel (b) shows a summary table depicting editing efficiencies of MG TadA candidates. FIG. 16B demonstrates that MG68-3 and MG68-4 drove base edits of adenine. In this experiment, colonies were picked from the plates with greater than or equal to 0.5 μg/mL Cm.

[0440] FIG. 17 shows an improvement of base editing efficiency of MG68-4 nSpCas9 via D109N mutation on MG68-4. Panel (a) shows photographs of growth plates where wild type MG68-4 and its variant were tested against 0 to 4 μg/mL of chloramphenicol. For simplicity, identities of deaminases are shown. Adenine base editors in this experiment comprise N-terminal TadA variants and C-terminal SpCas9 (D10A) nickase. Panel (b) shows a summary table depicting editing efficiencies of MG TadA candidates. Panel (b) demonstrates that MG68-4 and MG68-4 (D109N) showed base edits of adenine, with the D109N mutant showing increased activity. In this experiment, colonies were picked from the plates with greater than or equal to 0.5 μg/mL Cm.

[0441] FIG. 18 shows base editing of MG68-4 (D109N)_nMG34-1. Panel (a) shows photographs of growth plates of an experiment where an ABE comprising N-terminal MG68-4 (D109N) and C-terminal SpCas9 (D10A) nickase was tested against 0 to 2 μg/mL of chloramphenicol. Panel (b) shows a summary table depicting editing efficiencies with and without sgRNA. In this experiment, colonies were picked from the plates with greater than or equal to 1 μg/mL Cm.

[0442] FIG. 19 shows 28_MG68-4 variants designed for improvements of MG68-4-nMG34-1 base editing activity. 12 residues were selected for targeted mutagenesis to improve editing of the enzymes.

### Example 15—Plasmid Construction for E. coli Optimized Constructs

[0443] All plasmids for cytidine deaminase expression were prepared by Twist Biosciences. Each construct was codon optimized for E. coli expression and inserted into the XhoI and BamHI restriction sites of the pET-21(+) vector. Sequences were designed to exclude BsaI restriction sites. The following sequence was appended to the beginning of each construct: 5′-GAAATAATTTTGTTTAACTTTAAGAAGGAGATATACATATGGGCAGCAGTCATCATC ATCACCATCAC-3′. This sequence encodes a ribosomal binding site and an N-terminal hexahistidine tag. At the end of each CDA sequence, a stop codon was added to prevent incorporation of the C-terminal HisTag encoded by pET-21(+).

### Example 16—Plasmid Construction for Mammalian Optimized Constructs

[0444] All plasmids for cytidine deaminase expression in mammalian cells were codon optimized and ordered from Twist Biosciences. Each construct was codon optimized for H. sapiens expression. Restriction sites avoided were: BsaI, SphI, EcoRI, BmtI, BstX, BlpI and BamHI. The following sequence was appended 5′ of the codon optimized sequences: ACCGGTGCTAGCCCACC. This sequence contains a BmtI restriction site to be used for downstream cloning and a Kozak sequence for maximum translation. The following sequence was appended 3′ of the codon optimized CDA: AGCGCATGC. This sequence contains a SphI restriction site to allow for downstream cloning—stop codon was removed in all constructs.

### Example 17—Cell Culture, Transfections, Next Generation Sequencing, and Base Edit Analysis

[0445] HEK293T cells were grown and passaged in Dulbecco's Modified Eagle's Medium plus GlutaMAX (gibco) supplemented with 10% (v/v) fetal bovine serum (gibco) at 37° C. with 5% CO₂ 2.5×10⁴ cells were seeded on 96-well cell culture plates treated for cell attachment (Costar) grown for 20 to 24 h, and the spent media were refreshed with new media right before transfection. 300 ng expression plasmid and 1 μL lipofectamine 2000 (ThermoFisher Scientific) were used for transfection per well per manufacturer's instructions. Transfected cells were grown for 3 days, harvested, and gDNA was extracted with QuickExtract (Lucigen) per manufacturer's instructions. Targeted regions for base edits were amplified using Q5 High-Fidelity DNA polymerase (New England Biolabs) with primers (SEQ ID NOs: 690-707, 865-872, and 932-961) and extracted DNA as the templates. PCR products were purified by HighPrep PCR Clean-up System (MAGBIO) per manufacturer's instructions. To analyze base substitutions of adenine base editors, adapters used for next generation sequencing (NGS) were appended to PCR products by subsequent PCR reactions using KAPA HiFi HotStart ReadyMix PCR Kit (Roche) and primers compatible with TruSeq DNA Library Prep Kits (illumina). DNA concentrations of the resulting products were quantified by TapeStation (Agilent), and samples were pooled together to prepare the library for NGS analysis. The resulting library was quantified by qPCR with Aria Real-time PCR System (Agilent) and high through sequencing was performed with an Illumina Miseq instrument per manufacturer's instructions. Sequencing data was analyzed for base edits by Crispresso2.

### Example 18—In Vitro Deaminase In-Gel Assay

[0446] Linear DNA constructs containing the cytidine deaminases were amplified from the previously mentioned plasmids from Twist via PCR. All constructs were cleaned via SPRI Cleanup (Lucigen) and eluted in a 10 mM tris buffer. Enzymes were expressed from the PCR templates in an in-vitro transcription-translation system, PURExpress (NEB), at 37° C. for 2 hours. Deamination reactions were prepared by mixing 2 uLs of the PURExpress reaction with 2 uM 5′-FAM labeled ssDNA (IDT) and 1U USER Enzyme (NEB) in 1× Cutsmart Buffer (NEB). The reactions were incubated at 37° C. for 2 hours and then quenched by adding 4 units of proteinase K (NEB) and incubation at 55° C. for 10 minutes. The reaction was further treated by addition of 11 uL of 2×RNA loading dye and incubation at 75° C. for 10 minutes. All reaction conditions were analyzed by gel electrophoresis in a 10% denaturing gel (Biorad). DNA bands were visualized by a Chemi-Doc imager (Biorad) and band intensities were quantified using BioRad Image Lab v6.0. Successful deamination is observed by the visualization of a 10 bp fluorescently labeled band in the gel (FIG. 20). The results indicated that MG93-3 through MG93-7, MG93-11, MG138-17, MG138-20, MG138-23, MG139-12, and MG139-19 through MG139-21 were capable of deaminating cytidine-containing substrates.

[0447] The in vitro activity of more than 90 novel cytidine deaminases on a ssDNA substrate containing cytosine in all four possible 5′-NC contexts was measured (FIG. 23). 38 of these cytidine deaminases displayed ssDNA deamination activity, including 5 that are capable of substantially total deamination of the target cytidine (MG139-84/SEQ ID NO:808, MG139-86/SEQ ID NO:810, MG139-87/SEQ ID NO:811, MG139-95/SEQ ID NO:819, and MG139-102/SEQ ID NO:826, see e.g. FIG. 23). Additionally, some of the deaminases also showed greater than 50% deamination of the target cytosine (MG139-30/SEQ ID NO:752, MG139-55/SEQ ID NO:777, MG139-99/SEQ ID NO:823). While most of the reported DNA cytidine deaminases operate predominantly on ssDNA, often with a preference for the base immediately 5′ of the substrate C, a related dsDNA substrate was also included as a control (FIG. 24), verifying that MG139-86 and MG139-87 are capable of also deaminating dsDNA substrates.

### Example 19—NGS-Based Deep Deamination In Vitro Assay

[0448] We created an ssDNA library with a single target C to determine cytosine deaminase activity and binding location preference. Briefly, an ssDNA substrate oligonucleotide 5′-NNNCNNN flanked by 21-nt and 21-nt regions comprising adenine, an upstream 20 nt randomized barcode, and two conserved primer binding site was synthesized (Integrated DNA Technologies).

[0449] This yielded an oligonucleotides pool with 4096 unique substrate sequences. Unique barcodes were included on each oligo to determine the original variable region post-sequencing in case of non-target C deamination events. First, deaminases were expressed from the PCR templates in an in-vitro transcription-translation system, PURExpress (NEB), at 37° C. for 2 hours. Then the PURExpress was then incubated with 0.5 pmol of the substrate oligonucleotide pool for 1 h at 37° C. in 50 mM Tris, pH 7.5, 75 mM NaCl.

[0450] A. Half of the treated pool was amplified using the Accel-NGS 1S Plus kit (Swift) to create a dsDNA pool. This pool was then further amplified with unique dual indexes and sequenced on a MiSeq for >15,000 reads per sample.

[0451] B. Half of the treated pool was annealed to an appropriate 3′-barcoded adaptor (IDT) and treated with T4 DNA polymerase at 12° C. for 20 min to create a dsDNA pool. Using the conserved regions this pool was amplified with unique dual indexes (IDT) and sequenced on a MiSeq for >15,000 per samples.

### Example 20—Lentivirus Production and Transduction

[0452] HEK293T cells were grown and passaged in Dulbecco's Modified Eagle's Medium plus GlutaMAX (gibco) supplemented with 10% (v/v) fetal bovine serum (gibco) at 37° C. with 5% CO₂. The day before transfection, cells were seeded at 5×10⁶ per dish. The day of transfection, 8 g of PsPax, 1 μg of pMD2-G, and 9 μg of plasmid containing the cytidine deaminase fused with MG3-6 or Cas9 were mixed together and packaged into Mirus LT1 transfection reagent (Mirus Bio). The mixture was transfected into HEK293T cells. Lentiviruses were collected 3 days post-transfection, filtered through a 0.4 uM filter, and immediately used for transducing cells. Transduction occurs by adding 12 volume of virus containing supernatant to cells with 8 μg/mL of polybrene.

### Example 21—Adenine and Cytidine Base Editors in E. coli and Mammalian Cells

[0453] To demonstrate that MG34-1, a small type II CRISPR nuclease, can be used as a base editor, a construct comprising TadA*(8.17m)-nMG34-1 (ABE-MG34-1, SEQ ID NO: 727), where TadA*(8.17m) is an engineered TadA from E. coli, and a construct comprising rAPOBEC1-nMG34-1-UGI (PBS) (CBE-MG34-1, SEQ ID NO: 739), where rAPOBEC1 is rat APOBEC1 and UGI (PBS) is the uracil glycosylase inhibitor of Bacillus subtilis bacteriophage, were generated. TadA*(8.17m)-nSpCas9 (SEQ ID NO: 728) and rAPOBEC1-nSpCas9-UGI (PBS) (SEQ ID NO: 740) were generated as positive controls for editing profile analysis. Four guides that target lacZ gene in E. coli (SEQ ID NOs: 729-736) were designed and prepared for each base editor construct. Plasmids were transformed into BL21(DE3), recovered in recovery media at 37° C. for 1 h, and cell plates were plated on LB agar plates containing 100 μg/mL carbenicillin and 0.1 mM IPTG. After growing cells at 37° C. for 16 to 20 h, colony PCR was used to amplify the targeted regions in E. coli genome, and the resulting products were analyzed with Sanger sequencing at Elim BIOPHARM (FIGS. 22A-22C). Sequencing results indicated that both ABE-MG34-1 and CBE-MG34-1 edited target loci in the E. coli genome at levels and within editing windows comparable to the positive control SpCas9 base editors (FIGS. 22A and 22B). Further, TadA*(8.17m)-nMG34-1 showed higher base substitution on two targeted loci. ABE-MG34-1 also displayed base editing in human cells with up to 22% editing efficiency across three different genomic targets (FIG. 22C).

[0454] To determine whether the SMART HNH endonuclease-associated RNA and ORF (HEARO) enzymes can be used as base editors, an ABE was constructed by fusing a TadA*-(7.10) deaminase monomer to the C-terminus of an engineered MG35-1 containing a D59A mutation (FIG. 22E). The A to G editing of this ABE was tested in a positive selection single-plasmid E. coli system in which the ABE is required to revert a chloramphenicol acetyltransferase (CAT) gene containing a Y193 mutation back to H193 to survive chloramphenicol selection (FIG. 22D). This plasmid contains a sgRNA with a spacer either targeting the mutant CAT gene or a scrambled, non-targeting spacer region (control). An enrichment of colonies was detected with E. coli transformed with the ABE-MG35-1 targeting the CAT gene when grown on plates containing 2, 3, and 4 μg/mL of chloramphenicol, while no colonies grew on the plate containing 8 μg/mL of chloramphenicol (FIG. 22E). Sanger sequencing confirmed that 26 of 30 colonies picked from the 2, 3, and 4 μg/mL plates transformed with the target spacer contained the expected Y193H reversion (Table 11 and FIG. 31).

TABLE 11
E. coli survival assay with ABE-MG35-1

| | |
|---|---|
| Chloramphenicol | Edited colonies |

| (ug/mL) | Target spacer | Non-target spacer |
|---|---|---|
| 0 | 1/10 | 0/10 |
| 2-4 | 26/30 | No colonies |
| 8 | No colonies | No colonies |

Colonies grown on plates containing chloramphenicol concentrations of 0, 2, 3, and 4 μg/mL were sequenced to confirm reversion of the CAT gene function. Experiments were performed as n = 2.

[0455] It is understood that the four colonies without the reverted CAT sequence contain more unedited than edited copies of the selection construct, as a single reverted CAT gene is sufficient to confer colony survival. No colonies were seen on the 2, 3, 4, and 8 μg/mL plates for E. coli cells transformed with the non-targeting spacer. While the 0 μg/mL condition was used as a transformation control, 1 of 10 colonies picked from the 0 μg/mL plate for cells transformed with the targeting spacer contained the Y193H reversion, indicating a detectable level of editing without chloramphenicol selection. However, the colony growth enrichment under chloramphenicol selection for the targeting ABE-MG35-1 condition confirmed that the MG35-1 nickase is a successful component for base editing. At 623 aa long, the ABE-MG35-1 represents the smallest, nickase-based adenine base editor to date (Table 12).

TABLE 12
Size comparison of SMART nucleases vs. references

| Enzyme | Length (aa) | ABE length* (aa) | CBE length (aa) |
|---|---|---|---|
| MG34-1 | 748 | 969 | 1104 |
| MG35-1 | 429 | 623 | — |
| SpCas9 | 1376 | 1588 | 1723 |
| CasMINI (type V) | 529 | — | — |

Base editor (ABE and CBE) size is approximated based on linkers and number of NLS signals added.
*For ABE, size was estimated with one TadA monomer.

### Example 22—Adenine Base Editor in Mammalian Cells

[0456] In a previous experiment, MG68-4v1 (predicted as a tRNA adenosine deaminase) was able to convert adenine to guanine, resulting in bacterial survival under chloramphenicol selection. Next, two base editors fusing deaminase with nickase, MG68-4v1-nMG34-1 and MG68-4v1-nSpCas9 were constructed. As a positive control for deaminase activity, an active variant engineered by Gaudelli et al. and created TadA*(8.8m)-nMG34-1 was used. To ensure genomic loci are able to be accessed by base editors, we selected guides that have shown activity for SpCas9 in mammalian cells. Out of 9 sites tested, MG68-4v1-nMG34-1 showed 11.3% editing efficiency at position 8 of site 2. When MG68-4v1 was fused to nSpCas9, the base editor exhibited 22.3% efficiency at position 5 of site 1 and 4.4% efficiency at position 6 of site 8. The replacement of MG68-4v1 with TadA*(8.8m) in MG68-4v1-nMG34-1 showed 7.3% and 9.7% at position 5 and 7 of site 1, respectively. The efficiencies were increased to 16.5% and 19.5% at position 6 and 8 of site 2, respectively. Besides, 4.1% and 3.4% editing were observed at position 7 and 8 when targeting to site 7. Taken together, these results indicate that MG68-4v1 and nMG34-1 demonstrate base editing activity in mammalian cells (FIG. 21).

### Example 23—Activity in Mammalian Cells (Cytidine Deaminase Assay in Tissue Culture Cells) (Prophetic)

[0457] The cytidine deaminase assay in cells is designed so that when the mutated stop codon ACG is mutated to ATG by a cytidine deaminase, cells can translate the blasticidin gene and therefore acquire resistance to this antibiotic. Upon transducing a reporter cell line (ACG containing cell) with a library of cytidine deaminases fused to Cas9 or MG3-6, it is expected that a fraction of cells will mutate the ACG to ATG and therefore gain resistance to blasticidin. Cells that have acquired such resistance and thus survive the selection assay are later subjected to next generation sequencing (NGS) to unveil the identity of the successful cytidine deaminase displaying cytidine base editor activity.

### Example 24—Mammalian Constructs for Cytosine Base Editors (CBEs)

[0458] Plasmids for CBEs using the nickase forms of spCas9, MG3-6, and MG34-1 were constructed using NEB HiFi assembly mix and DNA fragments containing the novel cytidine deaminases, the nuclease enzymes, and UNG sequence. For constructs containing spCas9, pAL318 was digested with the NotI and XmaI restriction enzymes. For constructs containing MG3-6, pAL320 was digested with the NcoI restriction enzyme. For constructs containing MG34-1, pAL226 was digested with the NotI and BamHI restriction enzymes.

[0459] For experiments targeting the engineered cell line (SEQ ID NO. 962), CDAs were fused with MG3-6 nickase. For cloning CDA constructs in the MG3-6 nickase backbone, CDAs were ordered as gene fragments from Twist and digested with SphI and BmtI. The plasmid backbone containing MG3-6 was digested with SphI and BmtI, and the gene fragments were ligated using T4 DNA ligase. The plasmid backbone contains a mU6 promoter for cloning gRNAs targeting the engineered sites. The spacers targeting the engineered sites using MG3-6 are shown in SEQ ID NOs. 963-967.

[0460] CBEs were constructed using various combinations of cytidine deaminases, nickase effectors, and uracil glycosylase inhibitors (FIGS. 25A-25C). Overall, 14 cytidine deaminases (13 novel cytidine deaminases (MG139-12 (SEQ ID NO. 970), MG93-3 (SEQ ID NO. 971), MG93-4 (SEQ ID NO. 972), MG93-5 (SEQ ID NO. 973), MG93-6 (SEQ ID NO. 974), MG93-7 (SEQ ID NO. 975), MG93-9 (SEQ ID NO. 976), MG93-11 (SEQ ID NO. 977), MG138-17 (SEQ ID NO. 978), MG138-20 (SEQ ID NO. 979), MG138-23 (SEQ ID NO. 980), MG138-32 (SEQ ID NO. 981), and MG142-1 (SEQ ID NO. 982)) that were shown to be active in vitro and the A0A2K5RDN7 cytidine deaminase were each fused with 3 effectors (spCas9 (SEQ ID NOs. 877-889 and 968), MG3-6 (SEQ ID NOs. 890-902 and 969), or MG34-1 (SEQ ID NOs. 903-916)) to generate 42 distinct CBEs. Fusions containing spCas9 were fused with a C-terminal UGI, and fusions containing MG3-6 or MG34-1 were fused with a C-terminal MG69-1 UGI. Each CBE was tested with 5 sgRNAs (spCas9 (SEQ ID NOs. 917-921), MG3-6 (SEQ ID NOs. 922-926), or MG34-1 (SEQ ID NOs. 927-931)) targeting the HEK293 genome. Editing levels (C to T (%)) are shown for all cytosines within 5 bp of the spacer region. Numerous CBEs showed detectable editing levels when transiently transfected into HEK293 cells. When fused to spCas9, both MG93-4 and MG138-20 exceeded 5% editing at certain sites with MG93-3, MG93-7, and A0A2K5RDN7 exceeding 10% editing. When fused to MG3-6, MG93-4 and A0A2K5RDN7 exceeded 5% editing at certain sites. When fused to MG34-1, MG93-4, MG93-6, and MG93-9 exceeded 5% editing at certain sites, MG93-3, MG93-7, and MG139-12 exceeded 10% editing, and MG93-11 and A0A2K5RDN7 exceeded 20% editing. Numerous novel cytidine deaminases have been identified that are compatible with spCas9, MG3-6, and MG34-1 and are able to deaminate cytosines in mammalian cells.

[0461] In order to test the novel CDAs and assay for −1 nucleotide preferences, the CDAs were fused to MG3-6 and targeted a reporter cell line with 5 engineered PAMs in tandem (sequence ID no. 962). 14 CDAs were tested using this system, and many show >1% editing (Panel (a) of FIG. 26). The highest activity observed for a novel CDA fused to MG3-6 was 38.4% for MG152-6, with the second highest showing 17.6% for MG139-52. Their relative activity in comparison to A0A2K5RDN7 is shown in Panel (b) of FIG. 26. Interestingly, it was also observed that the highly active MG139-52 might deaminate the DNA strand that is part of the DNA/RNA heteroduplex in the R-loop (as well as the ssDNA); an example of this is shown in Panel (c) of FIG. 26. This activity (DNA deamination when the DNA is in a DNA/RNA heteroduplex) may highly improve off target effects as well as editing window, both of which may be beneficial for cytotoxicity.

### Example 25—Cytosine Base Editors Toxicity in Mammalian Cells

[0462] HEK293T cells were transduced with lentiviruses carrying newly discovered CDAs fused to MG3-6. Successful transformants were selected by using 2 μg/mL of puromycin for 3 days. Death cells were washed with PBS and surviving cells were fixed and stained with 50% methanol and 1% crystal violet (Panel (a) of FIG. 27). Cells were then photographed in a chemidoc and the absorbance was measured by dissolving the crystal violet in 1% SDS and taking measurements at 570 nm (Panel (b) of FIG. 27).

[0463] The highly active CDA A0A2K5RDN7 shows high editing efficiency, but it also exhibits a high degree of cell toxicity (Panel (a) of FIG. 27). The deaminases were assayed as base editors (fused to MG3-6) and stably expressed in HEK293T cells. MG93-3 and MG93-4 both showed much less cellular toxicity than A0A2K5RDN7. Quantification of the toxicity assay (Panel (b) of FIG. 27) shows that MG93-3 and MG93-4 are less toxic than rAPOBEC.

### Example 26—Directed Evolution of Adenosine Deaminase in E. coli

[0464] MG68-4 harboring a D109N mutation can improve DNA editing efficiency in E. coli. For simplicity, this variant was designated r1v1. To further improve the efficiency for editing in mammalian cells, the deaminase portion of MG68-4 (D109N)-nMG34-1 was randomly mutagenized by error prone PCR. The resulting library was tested for the editing activity of variants by an E. coli positive selection using chloramphenicol acetyltransferase with H193Y mutation.

[0465] To perform this experiment, the gene fragment of MG68-4 (D109N) was mutagenized by GeneMorph II Random mutagenesis kit according to the manufacturer's instructions. In general, 500 ng DNA template was used, and 20 cycles of PCR reaction was carried out to get a mutation frequency ranging from 0 to 4.5 mutations/kb. The vector pAL478 carrying nMG34-1, CAT (H193Y), and single guide expression cassette was linearized by SacII and KpnI digestion. PCR products from random mutagenesis were then cloned into the linearized vector by NEBuilder HiFi DNA assembly kit. The assembled product was transformed into BL21(DE3) (Lucigen), recovered with recovery media, and plated on LB agar plates containing 100 μg/mL carbenicillin, 0.1 mM IPTG, and chloramphenicol with concentrations of 2, 4, and 8 μg/mL. After bacterial selection, 260 colonies from plates of 4 and 8 μg/mL chloramphenicol were picked and sequenced by Sanger sequencing at Elim Biopharmaceuticals. Colonies carrying point mutations on MG68-4 (D109N) were grown in 96-well deep well plates and pooled together. Plasmids of these cells were isolated using QIAprep Spin Miniprep Kit (Qiagen) and MG68-4 variants were subcloned into pAL478 by digestion and ligation using restriction enzymes (SacII and KpnI) and T4 DNA ligase, respectively. The resulting library was transformed into Endura electrocompetent cells (Lucigen), amplified, and isolated by miniprep. Collected DNA was transformed into BL21(DE3) and tested for deaminase activity using chloramphenicol selection with concentrations of 2, 16, 32, 64, and and 128 μg/mL. 128 colonies (which were understood to contain mutations that facilitated deaminase activity of the MG68 enzyme and survival under chloramphenicol selection) from plates of 32, 64, and 128 μg/mL chloramphenicol were picked and sequenced by Sanger sequencing.

[0466] A total of 25 variants (r2v1 to r2v24 (SEQ ID NOs. 837-860) were uncovered and mutations were confirmed by Sanger sequencing. Through this evolution process, 24 residues were identified that were mutated to other amino acids (FIG. 28). These mutants contained mutations at T2 (e.g. T2A), D7 (e.g. D7G), E10 (e.g. E10G), M13 (e.g. M13R), W24 (e.g. W24G), G32 (e.g. G32A), K38 (e.g. K38E), G45 (e.g. G45D), G51 (e.g. G51V), A63 (e.g. A63S), E66 (e.g. E66V or E66D), R75 (e.g. R75H), C91 (e.g. C91R), G93 (e.g. G93W), H97 (e.g. H97Y or H97L), A107 (e.g. A107V), E108 (e.g. E108D), D109 (e.g. D109N), P110 (e.g. P110H), H124 (e.g. H124Y), A126 (e.g. A126D), H129 (e.g. H129R or H129N), F150 (e.g. F150P or F150S), S165 (e.g. S165L).

### Example 27—Adenine Base Editors in Mammalian Cells

[0467] Variants of adenine base editors identified from E. coli selection in Example 27 were codon-optimized for mammalian cell expression and tested in HEK293T cells. Four guides were designed to test A to G conversion in cells (SEQ ID NOs. 861-864 for spacers and SEQ ID NO. 876 for MG34-1 guide scaffold). 11 variants (r2v3, r2v5, r2v7, r2v8, r2v11, r2v12, r2v13, r2v14, r2v15, r2v16, and r2v23 (SEQ ID NOs. 839, 841, 843, 844, 847, 848, 849, 850. 851, 852, and 859) outperformed r1v1 in the first three guides screened. When the mutations were displayed on the predicted structure of MG68-4, it was found that five residues (W24, G51, E108, P110, and F150) surrounding the active site were changed. Notably, r2V7 (D7G and E10G (SEQ ID NO. 843)) and r2V16 (H129N (SEQ ID NO. 852)), while containing mutations away from the active site, displayed greater improvement of editing efficiencies than other mutations (FIG. 29). With this round of screening, editing efficiency of r1v1 was increased from 2.8% to 7.9% on r2v7 and from 2.8% to 9.09% on r2v16 when guide 2 was used (FIG. 30).

### Example 28—Deaminase Activity on ssRNA (Prophetic)

[0468] This protocol was adapted from Wolfe, et. al. (NAR Cancer, 2020, Vol. 2, No. 4 1 doi: 10.1093/narcan/zcaa027). Linear DNA constructs containing the CDA and A1CF, a cofactor, are amplified from constructs prepared by Twist (SEQ ID NO. 741) using the same primers developed for the in gel assay on ssDNA. Constructs are cleaned by PCR Spin Column Cleanup (Qiagen) and analyzed by gel electrophoresis. Enzymes are expressed from the PCR templates in an in vitro transcription-translation system, PURExpress (NEB), at 37° C. for 2.5 hours. Deamination reactions are prepared by mixing 2 uLs of the PURExpress reaction (CDA and A1 CF) with 2 uM ssRNA substrate (IDT, SEQ ID NO. 742) in the presence of an RNAse inhibitor and incubating at 37C for 2 hours. 5′ FAM labeled DNA primer (IDT, SEQ ID NO. 743) is then added to a concentration of 1.3 μM. The reaction is heated at 95° C. for 10 minutes and then allowed to cool gradually to room temperature for at least 30 minutes. Then, a reverse transcription mastermix comprising 5 mM DTT, Protoscript II RT (NEB) (5 U/μL), Protoscript II Buffer (NEB) (1×), RNAseOut (ThermoFisher) (0.4 U/μL), dTTP (0.25 mM), dCTP (0.25 mM), dATP (0.25 mM), and ddGTP (5 mM) is added. A full length transcription product is produced when the RNA substrate is deaminated. In contrast, when there is no deamination, a “C” will remain in the RNA substrate, and the reverse transcription reaction will terminate upon incorporation of ddGTP opposite this C. The reaction is incubated at 42° C. for one hour, and then at 65° C. for 10 minutes. Aliquots are then mixed with 2×RNA loading dye (NEB) and heated at 75° C. for 10 minutes, then cooled on ice for two minutes. Samples are loaded onto 10% or 15% Urea-TBE denaturing gels (Biorad). DNA bands are visualized by a Chemi-Doc imager (Biorad). Successful deamination is observed by the visualization of a full length (55 bp) fluorescently labeled band in the gel. Non-deaminated products appear as shorter (43 bp) fluorescently labeled bands.

### Example 29—Increased Cytosine Base Editing Efficiency Upon Fam72a Expression

[0469] Fam72a has been documented as opposing uracil DNA glycosylase (UDG) during B cell somatic hypermutation and class-switch recombination to prevent mismatch-repair-based correction of mutated Immunoglobulin alleles. Expression of Fam72a during engineered cytosine base editing may suppress UDG activity and thereby increase the conversion targeted of C into T.

[0470] HEK293 cells (150,000) were lipofected using JetOptimus according to the manufacturer's instructions with plasmids encoding a Cas9-CBE fusion (pMG3078; 500 ng), a plasmid encoding either sgRNA PE266 or PE691 (250 ng), and a plasmid encoding either Fam72a (pMG3072; 500 ng) or not. Cells were harvested 72 hours post-transfection, genomic DNA prepared, and the degree of base editing was determined via computational analysis of next-generation sequencing reads (FIG. 32). The CMV-driven Fam72a expression construct demonstrated increased CBE activity at two loci when Fam72a was co-expressed with a Cas9-based cytosine base editor. It was determined that Fam72a can be useful to improve cytosine base editing (CBE) with any type of cytosine base editor, not just Cas9-based constructs.

### Example 30—Structural Optimization of Adenine Base Editors

[0471] 33 rationally-designed ABE variants were constructed for use in mammalian cells under control of a CMV promoter (SEQ ID NOs: 1128-1160). Eights constructs contained ABEs with a MG68-4 (D109N) adenine deaminase fused to either the N- or C-terminus of a MG3-6/3-8 nickase enzyme (D13A) with linker lengths of 20, 36, 48, and 62 amino acid residues. Additionally, 25 constructs contained ABEs with an MG68-4 (D109N) adenine deaminase inlaid within the RUVC-I, REC, HNH, RUVC-III, or WED domains with 18 amino acid linkers fused to either end. These constructs are summarized in Table 12A.

TABLE 12A
Rationally-designed ABE Variants from Example 30

| SEQ ID | | Fusion/Inlaid | MG3-6/3-8 Domain |
|---|---|---|---|
| NO: | Description | position* | Containing Inlaid MG68-4 |
| 1128 | 3-68_DIV1_M_RDr1v1_B | N-term 36AA linker | N-terminal fusion |
| 1129 | 3-68_DIV2_M_RDr1v1_B | N-term 48AA linker | N-terminal fusion |
| 1130 | 3-68_DIV3_M_RDr1v1_B | N-term 62AA linker | N-terminal fusion |
| 1131 | 3-68_DIV4_M_RDr1v1_B | N-term 20AA linker | N-terminal fusion |
| 1132 | 3-68_DIV5_M_RDr1v1_B | C-term 36AA linker | C-terminal fusion |
| 1133 | 3-68_DIV6_M_RDr1v1_B | C-term 48AA linker | C-terminal fusion |
| 1134 | 3-68_DIV7_M_RDr1v1_B | C-term 62AA linker | C-terminal fusion |
| 1135 | 3-68_DIV8_M_RDr1v1_B | C-term 20AA linker | C-terminal fusion |
| 1136 | 3-68_DIV9_M_RDr1v1_B | Inlaid 26AA | RUVC-I |
| 1137 | 3-68_DIV10_M_RDr1v1_B | Inlaid 202AA | REC |
| 1138 | 3-68_DIV11_M_RDr1v1_B | Inlaid 262AA | REC |
| 1139 | 3-68_DIV12_M_RDr1v1_B | Inlaid 297AA | REC |
| 1140 | 3-68_DIV13_M_RDr1v1_B | Inlaid 335AA | REC |
| 1141 | 3-68_DIV14_M_RDr1v1_B | Inlaid 409AA | REC |
| 1142 | 3-68_DIV15_M_RDr1v1_B | Inlaid 537AA | Between Linker 1 and HNH |
| 1143 | 3-68_DIV16_M_RDr1v1_B | Inlaid 550AA | HNH |
| 1144 | 3-68_DIV17_M_RDr1v1_B | Inlaid 575AA | HNH |
| 1145 | 3-68_DIV18_M_RDr1v1_B | Inlaid 591AA | HNH |
| 1146 | 3-68_DIV19_M_RDr1v1_B | Inlaid 615AA | HNH |
| 1147 | 3-68_DIV20_M_RDr1v1_B | Inlaid 657AA | HNH |
| 1148 | 3-68_DIV21_M_RDr1v1_B | Inlaid 661AA | HNH |
| 1149 | 3-68_DIV22_M_RDr1v1_B | Inlaid 688AA | Between Linker 2 and |
| | | | RUVC-III |
| 1150 | 3-68_DIV23_M_RDr1v1_B | Inlaid 696AA | RUVC-III |
| 1151 | 3-68_DIV24_M_RDr1v1_B | Inlaid 717AA | RUVC-III |
| 1152 | 3-68_DIV25_M_RDr1v1_B | Inlaid 768AA | RUVC-III |
| 1153 | 3-68_DIV26_M_RDr1v1_B | Inlaid 771AA | RUVC-III |
| 1154 | 3-68_DIV27_M_RDr1v1_B | Inlaid 775AA | RUVC-III |
| 1155 | 3-68_DIV28_M_RDr1v1_B | Inlaid 782AA | RUVC-III |
| 1156 | 3-68_DIV29_M_RDr1v1_B | Inlaid 788AA | RUVC-III |
| 1157 | 3-68_DIV30_M_RDr1v1_B | Inlaid 791AA | RUVC-III |
| 1158 | 3-68_DIV31_M_RDr1v1_B | Inlaid 836AA | Between RUVC-III and WED |
| 1159 | 3-68_DIV32_M_RDr1v1_B | Inlaid 866AA | WED |
| 1160 | 3-68_DIV33_M_RDr1v1_B | Inlaid 887AA | WED |

*Inlaid denotes the upstream native residue after which the deaminase is inserted. For example, “Inlaid 887AA” indicates that the deaminase is inlaid between amino acids 887 and 888.

[0472] Plasmids expressing the 33 ABE variants were separately transiently co-transfected into HEK293 cells with plasmids expressing 8 sgRNAs (SEQ ID NOs: 1188-1195) targeting a specific locus in the human genome. After 72 hours, cells were harvested and analyzed for on-target editing (FIG. 36 and Table 12B).

TABLE 12B
Frequency of base editing detected for the HEK293T editing experiment of Example 30

| | | | A1 | A3 | A5 | A7 | A8 | A9 | A10 | A18 | A20 | A22 |
|---|---|---|---|---|---|---|---|---|---|---|---|---|
| | Insertion | | (A to | (A to | (A to | (A to | (A to | (A to | (A to | (A to | (A to | (A to |
| Construct | Site | Linker Length | G %) | G %) | G %) | G %) | G %) | G %) | G %) | G %) | G %) | G %) |
| 3-68_DIV1_M_RDr1v1_B | N-terminal | 36AA linker | 0.1 | 0.005 | 0.655 | 0.05 | 0.465 | 0.24 | 0.65 | 0.03 | 0.1 | 0.03 |
| | insertion | | | | | | | | | | | |
| 3-68_DIV2_M_RDr1v1_B | N-terminal | 48AA linker | 0.045 | 0.01 | 1.185 | 0.325 | 0.76 | 0.5 | 1.325 | 0.035 | 0.085 | 0.01 |
| | insertion | | | | | | | | | | | |
| 3-68_DIV3_M_RDr1v1_B | N-terminal | 62AA linker | 0.03 | 0.02 | 1.315 | 0.22 | 0.575 | 0.19 | 1.56 | 0.05 | 0.09 | 0.03 |
| | insertion | | | | | | | | | | | |
| 3-68_DIV4_M_RDr1v1_B | N-terminal | 20AA linker | | | | | | | | | | |
| | insertion | | | | | | | | | | | |
| 3-68_DIV5_M_RDr1v1_B | C-terminal | 36AA linker | 0.04 | 0.015 | 0.08 | 0.045 | 0.095 | 0.32 | 1.86 | 0.035 | 0.075 | 0.025 |
| | insertion | | | | | | | | | | | |
| 3-68_DIV6_M_RDr1v1_B | C-terminal | 48AA linker | 0.03 | 0.015 | 0.39 | 0.05 | 0.215 | 0.655 | 4.065 | 0.04 | 0.095 | 0.025 |
| | insertion | | | | | | | | | | | |
| 3-68_DIV7_M_RDr1v1_B | C-terminal | 62AA linker | 0.015 | 0.02 | 0.205 | 0.535 | 0.555 | 0.905 | 5.45 | 0.025 | 0.095 | 0.02 |
| | insertion | | | | | | | | | | | |
| 3-68_DIV8_M_RDr1v1_B | C-terminal | 20AA linker | 0.025 | 0.015 | 0.29 | 0.125 | 0.14 | 0.14 | 1.16 | 0.05 | 0.12 | 0.03 |
| | insertion | | | | | | | | | | | |
| 3-68_DIV9_M_RDr1v1_B | Inlaid 26AA | 18AA linker | | | | | | | | | | |
| 3-68_DIV10_M_RDr1v1_B | Inlaid 202AA | 18AA linker | 0.025 | 0.035 | 0.14 | 0.05 | 0.03 | 0.46 | 4.26 | 0.105 | 0.08 | 0.025 |
| 3-68_DIV11_M_RDr1v1_B | Inlaid 262AA | 18AA linker | | | | | | | | | | |
| 3-68_DIV12_M_RDr1v1_B | Inlaid 297AA | 18AA linker | 0.01 | 0.015 | 5.86 | 2.14 | 1.635 | 2.495 | 6.18 | 0.085 | 0.123 | 0.02 |
| 3-68_DIV13_M_RDr1v1_B | Inlaid 335AA | 18AA linker | | | | | | | | | | |
| 3-68_DIV14_M_RDr1v1_B | Inlaid 409AA | 18AA linker | | | | | | | | | | |
| 3-68_DIV15_M_RDr1v1_B | Inlaid 537AA | 18AA linker | 0.02 | 0.015 | 0.165 | 0.04 | 0.08 | 0.1 | 0.805 | 0.03 | 0.06 | 0.06 |
| 3-68_DIV16_M_RDr1v1_B | Inlaid 550AA | 18AA linker | 0.03 | 0.015 | 0.26 | 0.12 | 0.345 | 0.345 | 2.62 | 0.025 | 0.09 | 0.015 |
| 3-68_DIV17_M_RDr1v1_B | Inlaid 575AA | 18AA linker | | | | | | | | | | |
| 3-68_DIV18_M_RDr1v1_B | Inlaid 591AA | 18AA linker | | | | | | | | | | |
| 3-68_DIV19_M_RDr1v1_B | Inlaid 615AA | 18AA linker | 0.04 | 0.01 | 0.075 | 0.015 | 0.075 | 0.16 | 1.05 | 0.025 | 0.095 | 0.015 |
| 3-68_DIV20_M_RDr1v1_B | Inlaid 657AA | 18AA linker | | | | | | | | | | |
| 3-68_DIV21_M_RDr1v1_B | Inlaid 661AA | 18AA linker | 0.045 | 0.025 | 0.43 | 0.065 | 0.315 | 0.4 | 3.305 | 0.03 | 0.04 | 0.015 |
| 3-68_DIV22_M_RDr1v1_B | Inlaid 688AA | 18AA linker | | | | | | | | | | |
| 3-68_DIV23_M_RDr1v1_B | Inlaid 696AA | 18AA linker | | | | | | | | | | |
| 3-68_DIV24_M_RDr1v1_B | Inlaid 717AA | 18AA linker | | | | | | | | | | |
| 3-68_DIV25_M_RDr1v1_B | Inlaid 768AA | 18AA linker | 0.135 | 0.015 | 6.395 | 1.52 | 3.595 | 4.615 | 12.8 | 0.025 | 0.045 | 0.025 |
| 3-68_DIV26_M_RDr1v1_B | Inlaid 771AA | 18AA linker | 0.275 | 0.11 | 6.855 | 1.67 | 3.81 | 4.285 | 12.98 | 0.015 | 0.035 | 0.01 |
| 3-68_DIV27_M_RDr1v1_B | Inlaid 775AA | 18AA linker | 0.09 | 0.04 | 5.87 | 1.515 | 3.245 | 4.54 | 11.65 | 0.015 | 0.075 | 0.02 |
| 3-68_DIV28_M_RDr1v1_B | Inlaid 782AA | 18AA linker | 0.105 | 0.125 | 5.84 | 1.98 | 3.68 | 4.315 | 12.705 | 0.035 | 0.08 | 0.01 |
| 3-68_DIV29_M_RDr1v1_B | Inlaid 788AA | 18AA linker | 0.15 | 0.045 | 4.57 | 1.475 | 2.07 | 2.85 | 8.215 | 0.015 | 0.065 | 0.025 |
| 3-68_DIV30_M_RDr1v1_B | Inlaid 791AA | 18AA linker | 0.32 | 0.18 | 6.545 | 2.99 | 3.44 | 4.25 | 13.295 | 0.02 | 0.07 | 0.04 |
| 3-68_DIV31_M_RDr1v1_B | Inlaid 836AA | 18AA linker | | | | | | | | | | |
| 3-68_DIV32_M_RDr1v1_B | Inlaid 866AA | 18AA linker | | | | | | | | | | |
| 3-68_DIV33_M_RDr1v1_B | Inlaid 887AA | 18AA linker | | | | | | | | | | |
| Background | N/A | N/A | 0.015 | 0.015 | 0.005 | 0.03 | 0.025 | 0.035 | 0.245 | 0.03 | 0.075 | 0.025 |

[0473] Sequencing results showed that 19 of the 33 ABEs were capable of on-target editing at a level of at least 1% editing when co-expressed with an sgRNA targeting the TRAC locus (FIG. 33). Constructs used in this experiment included 3-68_DIV1_M_RDr1v1_B, 3-68_DIV2_M_RDr1v1_B, 3-68_DIV3_M_RDr1v1_B, 3-68_DIV4_M_RDr1v1_B, 3-68 DIV5_M_RDr1v1_B, 3-68 DIV6_M_RDr1v1_B, 3-68 DIV7_M_RDr1v1_B, 3-68_DIV8_M_RDr1v1_B, 3-68_DIV9_M_RDr1v1_B, 3-68_DIV10_M_RDr1v1_B, 3-68_DIV11_M_RDr1v1_B, 3-68_DIV12_M_RDr1v1_B, 3-68_DIV13_M_RDr1v1_B, 3-68_DIV14_M_RDr1v1_B, 3-68_DIV15_M_RDr1v1_B, 3-68_DIV16_M_RDr1v1_B, 3-68 DIV17_M_RDr1v1_B, 3-68 DIV18_M_RDr1v1_B, 3-68 DIV19_M_RDr1v1_B, 3-68_DIV20_M_RDr1v1_B, 3-68_DIV21_M_RDr1v1_B, 3-68_DIV22_M_RDr1v1_B, 3-68_DIV23_M_RDr1v1_B, 3-68_DIV24_M_RDr1v1_B, 3-68_DIV25_M_RDr1v1_B, 3-68_DIV26_M_RDr1v1_B, 3-68_DIV27_M_RDr1v1_B, 3-68_DIV28_M_RDr1v1_B, 3-68 DIV29_M_RDr1v1_B, 3-68 DIV30_M_RDr1v1_B, 3-68 DIV31_M_RDr1v1_B, 3-68_DIV32_M_RDr1v1_B, and 3-68_DIV33_M_RDr1v1_B (FIG. 36). The construct with the highest levels of editing of any A residue within the spacer region was 3-68_DIV30_M_RDr1v1_B, with a maximum on-target editing rate of 13.3% (n=2) (FIG. 33). Also of note was 3-68_DIV12_M_RDr1v1_B, which displayed similar editing levels between A5 (5.86%) and A10 (6.18%), indicating that v12 may have an altered base editing window within the spacer region relative to the other active ABEs. In addition to evaluating on-target editing, the cell viability of each base editor/sgRNA co-transfection was visually assessed. Cells transfected with numerous constructs, including 3-68_DIV30_M_RDr1v1_B and 3-68_DIV12_M_RDr1v1_B, had high cell viability, whereas many cells transfected with the N- or C-terminally fused constructs had low cell viability.

### Example 31—Engineering of the Adenosine Deaminase

[0474] As tRNA adenosine deaminase (TadA) from E. coli has been engineered to target DNA and improve the base editing activity in mammalian cells, it was postulated that porting analogous mutations documented to improve editing in EcTadA to MG68-4 (D109N) may improve the deaminase activity. By surveying the literature, mutations of EcTadA from ABE7.10, ABE8.8m, ABE8.17m, and ABE8e were collected. The equivalent residues on MG68-4 were parsed out through multiple sequence alignment and structural alignment. 22 rationally designed variants on top of MG68-4 (D109N) were generated and fused to the N-terminus of MG34-1 (D10A) (SEQ ID NOs: 1161-1183). To import base editors into the nucleus, a nuclear localization signal (NLS) was incorporated to the c-terminus of the enzyme. The effect of dual NLS system (e.g. on both N- and C-termini) on editing efficiency was evaluated (FIGS. 34A and 34B) (SEQ ID NOs: 1184-1186). Genes of base editors and guide RNAs were coexpressed by CMV and U6 promoters, respectively. In this experiment, single plasmids carrying required editing components (SEQ ID NOs: 1187 and 1207) were transfected into HEK293T cells, and editing efficiencies were evaluated through NGS. The results showed that the top three performers (RD9, RD18, and RD5) achieved 27.4%, 26.6%, and 23.8% A to G conversion on A8, respectively. A 45% increase in editing efficiency was obtained when comparing RD9 (MG68-4 (D109N/T112R)) to MGA1.1 (MG68-4 (D109N)). The two-NLS design had comparable activity to the one-NLS design. MGA1.1_2NLS achieved 11.4% conversion, which is lower than 19.2% MGA1.1 (FIG. 35).

### Example 32—Engineered CBEs to Relax Sequence Selectivity of CDA at −1 Position of the Target Cytosine and Improved On-Target Activity on DNA

[0475] Two approaches were taken toward mutagenesis to improve the editing activity and selectivity for cytosine base editors (CBEs). First, as it was hypothesized that low or mid-editing efficiency and nickase-independent deamination events of wild-type CBEs may be caused by the intrinsic DNA/RNA binding affinities of the cytidine deaminase(s), mutagenesis (point mutation) of cytidine deaminases to alter intrinsic DNA/RUNA affinity was considered. Second, as a loop adjacent to the active site has been identified as important for determining selectivity at the −1 position relative to the targeted cytosine in related families of base editors (loop 7, Kolhi et al., J. Biol. Chem 2009, 284, 22898-22904), experiments to swap loop 7 sequences among cytosine base editors were considered.

[0476] Utilizing structural-based homology models of APOBEC1 (Wolfe et al., NAR Cancer 2020, 2, 1-15), AID (Kolhi et al., J Biol. Chem. 2009, 284, 22898-22904), and APOBEC3A (Shi et al., Nat Struct Mol Biol. 2017, 24, 131-139), the putative loop 7 of novel cytidine deaminases described herein were predicted and identified in order to develop a loop 7 swapping experiment to relax the sequence selectivity of these candidates. Several residues were also targeted for mutation to increase activity on DNA and reduce RNA activity (Yu et al., Nature Communications 2020, 11, 2052). A total of 108 CDA variants (with MG93, MG139 and MG152 families) were designed with either a point mutation or a loop 7 swapping with AID deaminase that is documented to have a 5′RC selectivity (SEQ ID NOs: 1208-1315).

TABLE 12C
Cytosine Base Editor Mutants Investigated in Example 32

| | | | Background |
|---|---|---|---|
| SEQ ID | | Nomenclature | enzyme for |
| NO: | Description | in Experiments | mutation |
| 1208 | W90A | MG93_4v1 | MG93-4 |
| 1209 | W90F | MG93_4v2 | MG93-4 |
| 1210 | W90H | MG93_4v3 | MG93-4 |
| 1211 | W90Y | MG93_4v4 | MG93-4 |
| 1212 | Y120F | MG93_4v5 | MG93-4 |
| 1213 | Y120H | MG93_4v6 | MG93-4 |
| 1214 | Y121F | MG93_4v7 | MG93-4 |
| 1215 | Y121H | MG93_4v8 | MG93-4 |
| 1216 | Y121Q | MG93_4v9 | MG93-4 |
| 1217 | Y121A | MG93_4v10 | MG93-4 |
| 1218 | Y121D | MG93_4v11 | MG93-4 |
| 1219 | Y121W | MG93_4v12 | MG93-4 |
| 1220 | H122Y | MG93_4v13 | MG93-4 |
| 1221 | H122F | MG93_4v14 | MG93-4 |
| 1222 | H122I | MG93_4v15 | MG93-4 |
| 1223 | H122A | MG93_4v16 | MG93-4 |
| 1224 | H122W | MG93_4v17 | MG93-4 |
| 1225 | H122D | MG93_4v18 | MG93-4 |
| 1226 | Replace with hAID loop7 | MG93_4v19 | MG93-4 |
| 1227 | Replace with 139_86 loop 7 | MG93_4v20 | MG93-4 |
| 1228 | Truncate from 188 to end | MG93_4v21 | MG93-4 |
| 1229 | Y121T | MG93_4v22 | MG93-4 |
| 1230 | Replace with a smaller | MG93_4v23 | MG93-4 |
| | section of hAID loop7 | | |
| 1231 | Replace with a smaller | MG93_4v24 | MG93-4 |
| | section of hAID loop7 | | |
| 1232 | R33A | MG93_4v25 | MG93-4 |
| 1233 | R34A | MG93_4v26 | MG93-4 |
| 1234 | R34K | MG93_4v27 | MG93-4 |
| 1235 | H122A R33A | MG93_4v28 | MG93-4 |
| 1236 | H122A R34A | MG93_4v29 | MG93-4 |
| 1237 | R52A | MG93_4v30 | MG93-4 |
| 1238 | H122A R52A | MG93_4v31 | MG93-4 |
| 1239 | N57G (Shown to have | MG93_4v32 | MG93-4 |
| | lower off target | | |
| | activity in A3A) | | |
| 1240 | N57G H122A | MG93_4v33 | MG93-4 |
| 1241 | Replace with A3A loop7 | MG139_86v1 | MG139-86 |
| 1242 | E123A | MG139_95v1 | MG139-95 |
| 1243 | E123Q | MG139_95v2 | MG139-95 |
| 1244 | Replace with hAID loop7 | MG93_3v1 | MG93-3 |
| 1245 | Replace with 139_86 loop 7 | MG93_3v2 | MG93-3 |
| 1246 | W127F | MG93_3v3 | MG93-3 |
| 1247 | W127H | MG93_3v4 | MG93-3 |
| 1248 | W127Q | MG93_3v5 | MG93-3 |
| 1249 | W127A | MG93_3v6 | MG93-3 |
| 1250 | W127D | MG93_3v7 | MG93-3 |
| 1251 | R39A | MG93_3v8 | MG93-3 |
| 1252 | K40A | MG93_3v9 | MG93-3 |
| 1253 | H128A | MG93_3v10 | MG93-3 |
| 1254 | N63G | MG93_3v11 | MG93-3 |
| 1255 | R58A | MG93_3v12 | MG93-3 |
| 1256 | Replace with hAID loop7 | MG93_11v1 | MG93-11 |
| 1257 | Replace with 139_86 loop 7 | MG93_11v2 | MG93-11 |
| 1258 | H121F | MG93_11v3 | MG93-11 |
| 1259 | H121Y | MG93_11v4 | MG93-11 |
| 1260 | H121Q | MG93_11v5 | MG93-11 |
| 1261 | H121A | MG93_11v6 | MG93-11 |
| 1262 | H121D | MG93_11v7 | MG93-11 |
| 1263 | H121W | MG93_11v8 | MG93-11 |
| 1264 | N57G (Shown to have | MG93_11v9 | MG93-11 |
| | lower off target | | |
| | activity in A3A) | | |
| 1265 | R33A | MG93_11v10 | MG93-11 |
| 1266 | K34A | MG93_11v11 | MG93-11 |
| 1267 | H122A | MG93_11v12 | MG93-11 |
| 1268 | H121A | MG93_11v13 | MG93-11 |
| 1269 | R52A | MG93_11v14 | MG93-11 |
| 1270 | K16 through P25 of pgtA3H | 139_52v1 | MG139-52 |
| | replaces G20 through P26 | | |
| 1271 | S170 through D138 of pgtA3H | 139_52v2 | MG139-52 |
| | replaces K196 to V215 | | |
| 1272 | P26R | 139_52v3 | MG139-52 |
| 1273 | P26A | 139_52v4 | MG139-52 |
| 1274 | N27R | 139_52v5 | MG139-52 |
| 1275 | N27A | 139_52v6 | MG139-52 |
| 1276 | W44A (equivalent to R52A) | 139_52v7 | MG139-52 |
| 1277 | W45A (equivalent to R52A) | 139_52v8 | MG139-52 |
| 1278 | K49G (equivalent to N57G) | 139_52v9 | MG139-52 |
| 1279 | S50G (equivalent to N57G) | 139_52v10 | MG139-52 |
| 1280 | R51G (equivalent to N57G) | 139_52v11 | MG139-52 |
| 1281 | R121A (equivalent to H121A) | 139_52v12 | MG139-52 |
| 1282 | I122A (equivalent to H122A) | 139_52v13 | MG139-52 |
| 1283 | N123A (equivalent to H122A) | 139_52v14 | MG139-52 |
| 1284 | Y88F (equivalent to W90F) | 139_52v15 | MG139-52 |
| 1285 | Y120F (equivalent to Y120F) | 139_52v16 | MG139-52 |
| 1286 | P22R | 139_86v2 | MG139-86 |
| 1287 | P22A | 139_86v3 | MG139-86 |
| 1288 | K23A | 139_86v4 | MG139-86 |
| 1289 | K41R | 139_86v5 | MG139-86 |
| 1290 | K41A | 139_86v6 | MG139-86 |
| 1291 | truncate K179 and onwards | 139_86v7 | MG139-86 |
| 1292 | Insert hAID loop 7 and | 139_86v8 | MG139-86 |
| | truncate K179 onwards | | |
| 1293 | E54D and truncation | 139_86v9 | MG139-86 |
| 1294 | E54A Mutate catalytic E residue | 139_86v10 | MG139-86 |
| 1295 | Mutate neighboring E residue | 139_86v11 | MG139-86 |
| 1296 | E54AE55A Mutate both | 139_86v12 | MG139-86 |
| | catalytic E residues | | |
| 1297 | K30A | 152_6v1 | MG152-6 |
| 1298 | K30R | 152_6v2 | MG152-6 |
| 1299 | M32A | 152_6v3 | MG152-6 |
| 1300 | M32K | 152_6v4 | MG152-6 |
| 1301 | Y117A | 152_6v5 | MG152-6 |
| 1302 | K118A | 152_6v6 | MG152-6 |
| 1303 | I119A | 152_6v7 | MG152-6 |
| 1304 | I119H | 152_6v8 | MG152-6 |
| 1305 | R120A | 152_6v9 | MG152-6 |
| 1306 | R121A | 152_6v10 | MG152-6 |
| 1307 | P46A | 152_6v11 | MG152-6 |
| 1308 | P46R | 152_6v12 | MG152-6 |
| 1309 | N29A | 152_6v13 | MG152-6 |
| 1310 | Loop 7 from MG138-20 | 152_6v14 | MG152-6 |
| 1311 | Loop 7 from MG139-12 | 152_6v15 | MG152-6 |
| 1312 | R27A | 138_20v1 | MG138-20 |
| 1313 | N50G | 138_20v2 | MG138-20 |
| 1314 | Loop 7 from MG138-20 | 139_52v17 | MG139-52 |
| 1315 | Loop 7 from MG139-12 | 139_52v18 | MG139-52 |

### Example 33—In Vitro Activity of Novel CDA Variants from the MG93, MG139, and MG152 Families

### In Vitro Deaminase In-Gel Assay

[0477] Linear DNA constructs containing the CDA were amplified from the previously mentioned plasmids from Twist via PCR. All constructs were cleaned via SPRI Cleanup (Lucigen) and eluted in a 10 mM tris buffer. Enzymes were expressed from the PCR templates in an in vitro transcription-translation system, PURExpress (NEB), at 37° C. for 2 hours. Deamination reactions were prepared by mixing 2 μL of the PURExpress reaction with 2 μM 5′-FAM labeled ssDNA (IDT) (4 different ssDNA substrates were used with different −1 nucleobase (A or C or T or G) next to the target cytidine (SEQ ID NOs: 1316-1319; FIG. 37) or with 0.5 μM Cy3 and Cy5.5 labeled ssDNA (IDT, 2 different substrates with either AC vs GC or CC vs TC, SEQ ID NOs: 1320-1321; FIG. 38) and 1U USER Enzyme (NEB) in 1× Cutsmart Buffer (NEB). The reactions were incubated at 37° C. for 2 hours and then quenched by adding 4 units of proteinase K (NEB) and incubating at 55° C. for 10 minutes. The reaction was further treated by addition of 11 μL of 2×RNA loading dye and incubation at 75° C. for 10 minutes. All reaction conditions were analyzed by gel electrophoresis in a 10% denaturing gel (Biorad). DNA bands were visualized by a Chemi-Doc imager (Biorad) and band intensities were quantified using BioRad Image Lab v6.0 (FIG. 39). Successful deamination is observed by the visualization of a 10 bp fluorescently labeled band in the gel.

[0478] The deamination of cytosine (C) is catalyzed by cytidine deaminases and results in uracil (U), which has the base-pairing properties of thymine (T). Most documented cytidine deaminases operate on RNA, and the few examples that are documented to accept DNA require single-stranded DNA (ssDNA). The in vitro activity of 108 CDAs on 4 ssDNA substrates containing cytosine in all four possible 5′-NC contexts was measured (FIGS. 37 and 38). The percentage of deamination for each nucleobase at 1-nt position was also calculated to evaluate if the selected mutations altered the sequence selectivity of the designed variants in vitro (FIGS. 39 and 40). Notably, several variants display a more relaxed sequence base selectivity for MG93 and MG139 families (FIGS. 39 and 40) and were selected for downstream in vivo mammalian cell activity as full CBEs.

### Example 34—Mammalian Editing Activity of Novel and Engineered CDAs as CBEs

[0479] In order to test the activity of novel CDAs as well as engineered variants, an engineered cell line was devised with 5 consecutive PAMs compatible with MG3-6 and Cas9. This cell line allows for gRNA tiling to test editing efficiency and find −1 nt selectivity.

[0480] In order to test the novel and engineered CDAs, the CDAs were cloned in a plasmid backbone containing MG3-6. The CDAs were cloned in the N termini. Once the cloning of novel and variant CDAs was confirmed, they were transiently transfected into the engineered HEK293T cells using lipofectamine 2000. A total of 32 novel CDAs and 2 engineered variants (139-52-V6 and 93-4-V16) were tested in the gRNA tiling experiment described above (SEQ ID NOs: 1322-1355). Out of the 34 tested CDAs. 22 showed editing activity higher than 1% (FIG. 41A). The top performers were MG152-6, MG139-52v6, MG93-4, MG139-52, MG139-94, MG93-7, MG93-3, MG139-12, MG139-103, MG139-95, MG139-99, MG139-90, MG139-89, MG139-93, MG138-30, MG139-102, MG93-4v16, MG152-5, MG138-20, MG138-23, MG93-5, MG152-4, and MG152-1. When the editing activity was normalized per experimental condition relative to a positive control (documented high activity CDA: A0A2K5RDN7), it was observed that 9 candidates showed at least 20% the activity of the A0A2K5RDN7 positive control (FIG. 41B). Amongst these 9 candidates, 3 of them showed at least 50% the activity of A0A2K5RDN7; 139-52-V6, 152-6, and 139-52 showed 95%, 65%, and 60% of the activity, respectively. FIG. 41C shows side by side comparison of 2 targeting spacers. 139-52-V6 shows essentially the same editing activity as A0A2K5RDN7, as observed in FIG. 41C.

[0481] To characterize the −1 nt selectivity. 16 candidates of interest were selected. The −1 nt mammalian cell selectivity was calculated by selecting the top 4 modified cytosines per guide RNA and calculating the ratio per −1 position. The analysis was restricted to cytosines with >1% editing. The average ratio for all 5 guides were plotted. The −1 nt in vitro selectivity was plotted by calculating the sum of percentage cleavages (percent cleavage measures percent deamination) per −1 nt selectivity and then calculating the ratio per −1 nucleotide. The mammalian cell and in vitro −1 nt selectivity is shown in FIG. 42. Notably, different CDA families are documented as having different −1 nt selectivities, and their selectivities tend to be conserved amongst proteins belonging to the same family. For example, the MG93 family is documented to be selective for T as −1, while the MG139 family is documented to be selective for C as −1. Importantly, the active candidates are documented to have different −1 nt selectivities: 152-6 is selective for T in the −1 position, whereas the 139-52 (WT and engineered variant) has a strong selectivity for C at the −1 position. Having candidates with strong −1 nt selectivities is advantageous, since having a tighter nt selectivity improves off target activity. Candidates with different and strong −1 nt selectivities allow for targeting of different loci with minimal off target activity. Notably, candidates with unusual −1 selectivities were identified. Candidates with purine selectivities include 139-12 and 138-20, with A and G selectivities. These properties may generate variants with G and/or A −1 selectivities with high editing efficiencies.

[0482] The candidate 139-52 vas documented as having deaminase activity on both ssDNA and on the DNA strand forming a DNA/RNA heteroduplex (also shown in FIG. 43B). Having exclusive activity in the DNA forming a DNA/RNA heteroduplex may be advantageous in terms of guide-independent off target activity and smaller editing window, as such engineering for this feature is an important venue. When the 139-52-V6 mutant was generated, it was interestingly noted that it abolished the deaminase activity in the DNA/RNA heteroduplex, thus shedding light on the potential importance of this residue for such activity.

[0483] The 139-52-V6, 152-6, and 139-52 candidates have high editing efficiencies (FIGS. 41A, 41B, and 41C) and different −1 nt selectivities (FIG. 42). Seeking to characterize them further, how wide their targeting window was in relation to the R-loop formation (spacer targeting) was analyzed. 2 out of the 3 candidates (152-6 and 139-52-V6) show a tighter editing window when compared to the high editing positive control A0A2K5RDN7 (FIG. 44). Having a tighter editing window may help to prevent off-target activities. The engineered candidate 139-52-V6 has a smaller editing window than its WT counterpart (FIG. 44), shedding light on the importance of this mutation. The mutation improved the on-target editing efficiency (FIGS. 41A and 41B), while narrowing the editing window (FIG. 44).

[0484] Moreover, the cytotoxicity of all CDA candidates was measured by stably expressing the candidates in mammalian cells through lentiviral transduction. Each CDA candidate was cloned as CBE (using MG3-6 as partner), lentiviruses were produced, and cells were transduced. 3 days post-transduction, cells were selected for viral integration and CBE expression by puromycin selection. The puromycin cassette was downstream of CBEs with a 2A peptide; thus, cells surviving selection expressed the CBEs. Surviving cells were dyed with crystal violet, crystal violet was then solubilized with SDS, and absorbance was taken in a plate reader. It was determined that different CDAs have various levels of cytotoxicity (FIG. 45). The 139-52-V6, 152-6, and 139-52 candidates show a promising cytotoxicity profile under these conditions. It is expected that when the candidates are expressed transiently, this effect may diminish greatly.

### Example 35—Using Low Activity CDAs with Nickases with Improved Target Binding Affinity (Prophetic)

[0485] Analyzing the editing windows and cytotoxic profiles demonstrated that it may be advantageous to use CDAs with slower deamination kinetics in conjunction with effector enzymes with higher residency time in the targets. In order to create such systems, along form tracr RNA (see e.g. Workman et al. Cell 2021, 184, 675-688, which is incorporated by reference herein in its entirety) is used in the gRNA in conjunction with CDAs with various kinetics (low, medium, and high). These systems may improve on target editing efficiencies of low and medium CDAs, while generating a narrower editing window and a more favorable cytotoxic profile.

### Example 36—Adenine Deaminase Engineering (Prophetic)

[0486] To improve on-target activity on ssDNA and minimize cellular RNA-unguided deamination, all beneficial mutations previously identified from rational design and directed evolution in the literature were used to design new adenine deaminase (ADA) variants from novel deaminases families (MG129-MG137 and MG68 families, SEQ ID NOs: 1556-1638).

TABLE 12D
Adenosine Deaminase Mutants Designed in Example 36

| | | Name in |
|---|---|---|
| | | Experiments |
| | | (numbers |
| | | before “v” |
| | | denote |
| SEQ ID | Mutation (relative | background |
| NO: | to background enzyme) | enzyme |
| 1556 | A20R, A34L, R46A, E49L, V80S, L82F, | MG131-1v1 |
| | C104V, D106N, P107S, A109T, T117N, | |
| | A120N, D121Y, R144C, F147Y, L150P, | |
| | Q153V, G154F, K155N | |
| 1557 | A12R, A26L, R38A, T41L, V72S, L74F, | MG131-2v2 |
| | C96V, D98N, P99S, G101T, A109N, | |
| | V112N, D113Y, R136C, F139Y, L142P, | |
| | L145V, G146F, K147N | |
| 1558 | A21R, V34L, R46A, A49L, V80S, L82F, | MG131-5v3 |
| | C104V, D106N, P107S, A109T, S117N, | |
| | D121Y, Q144C, F147Y, L150P, Q153V, | |
| | G154F, K155N | |
| 1559 | T43R, A56L, R68A, G71L, V102S, | MG131-6v4 |
| | M104F, C126V, D128N, P129S, A131T, | |
| | R139N, D142N, D143Y, R166C, F169Y, | |
| | L172P, ins175V | |
| 1560 | T36R, R61A, N64L, V95S, M97F, C119V, | MG131-9v5 |
| | D121N, P122S, A124T, Q132N, D135N, | |
| | D136Y, K159C, F162Y, L165P, R168V | |
| 1561 | G41R, V54L, R66A, G69L, V100S, | MG131-7v6 |
| | M102F, C124V, D126N, P127S, A129T, | |
| | S137N, E140N, D141Y, R164C, F167Y, | |
| | L170P, P173V, E174F, A175N | |
| 1562 | G19R, R32L, R44A, W47L, V78S, L80F, | MG131-3v7 |
| | A102V, D104N, P105S, A107T, A115N, | |
| | E118N, D119Y, T141C, F144Y, L147P, | |
| | G150del, R151del, A153F, R154N, G156Q, | |
| | R157K, P158K, G160Q, E162S, E163I, | |
| | E164N | |
| 1563 | A20R, D33L, R46A, E49L, V80S, L82F, | MG134-1v1 |
| | C104V, D106N, P107S, A109R, D117N, | |
| | R120N, D121Y, Q144C, F147Y, K153V, | |
| | N154F, R155N | |
| 1564 | A19R, R32L, R44A, E47L, V78S, L80F, | MG134-2v2 |
| | A102V, D104N, P105S, A107R, E115N, | |
| | T118N, D119Y, R142C, F145Y, R151V, | |
| | A152F, K153N | |
| 1565 | A25R, R50A, D53L, V84S, L86F, A108V, | MG134-3v3 |
| | D110N, A111S, A113R, Q121N, S124N, | |
| | D125Y, R148C, F151Y, R157V, R158F, | |
| | R159N | |
| 1566 | G19R, R32L, R44A, E47L, V78S, L80F, | MG134-4v4 |
| | A102V, D104N, P105S, A107R, Q115N, | |
| | E118N, D119Y, K142C, F145Y, A148P, | |
| | R151V, A152F, R153N | |
| 1567 | S20R, R33L, P45A, A48L, V79S, V81F, | MG135-1v1 |
| | A103V, D105N, P106S, A108T, Q116N, | |
| | H120Y, Q143C, F146Y, K149P | |
| 1568 | L32R, S45L, P57A, A60L, V91S, V93F, | MG135v-2v2 |
| | A115V, D117N, A118S, A120T, Q128N, | |
| | H132Y, Q155C, F158Y, R161P, E164V, | |
| | P165F, D166N | |
| 1569 | L12R, H25L, S37A, D40L, A71S, I73F, | MG135-4v3 |
| | A95V, SD97N, P98S, A100T, Q108N, | |
| | H112Y, Q135C, F138Y, R141P | |
| 1570 | L25R, C38L, N50A, D53L, A84S, I86F, | MG135-5v4 |
| | A108V, D110N, L111S, A113T, Q121N, | |
| | H125Y, Q148C, F151Y, R154P | |
| 1571 | L44R, H57L, N69A, D72L, V103S, I105F, | MG135-6v5 |
| | S127V, D139N, P130S, A132T, P140N, | |
| | H144Y, Q167C, F170Y, R173P | |
| 1572 | L12R, H25L, N37A, E40L, V71S, I73F, | MG135-8v6 |
| | A95V, D97N, P98S, A100T, Q108N, | |
| | H112Y, Q135C, F138Y, R141P | |
| 1573 | A20R, C33L, N45A, D48L, V79S, I81F, | MG135-7v7 |
| | A103V, D105N, P106S, A108T, T116N, | |
| | H120Y, R143C, F146Y, K149P | |
| 1574 | Q20R, C33L, N45A, D48L, V79S, I81F, | MG135-3v8 |
| | A103V, D105N, P106S, A108T, G116N, | |
| | H120Y, Q143C, F146Y, K149P | |
| 1575 | E30R, S43L, P55A, V80S, T114V, E116N, | MG137-1v1 |
| | P117S, A119R, Q127N, K130N, N131Y, | |
| | S155C, F158Y, R161P | |
| 1576 | A30R, M43L, P55A, V89S, T113V, | MG137-2v2 |
| | E115N, P116S, A118R, Q126N, Q129N, | |
| | D130Y, Q153C, F156Y, R159P, K173I, | |
| | E174N | |
| 1577 | A23R, R36L, P48A, V82S, A106V, E108N, | MG137-4v3 |
| | P109S, A111R, C119N, D122N, E123Y, | |
| | S146C, F149Y, R152P, K166I, E167N | |
| 1578 | A23R, P48A, V82S, A106V, E108N, | MG137-6v4 |
| | P109S, A111R, R119N, E122N, E123Y, | |
| | S146C, F149Y, R152P, K166I, E167N | |
| 1579 | A22R, P47A, V81S, A105V, E107N, | MG137-17v5 |
| | P108S, A110R, R118N, D121N, E122Y, | |
| | S145C, F148Y, R151P, K166I, E167N | |
| 1580 | A28R, R41L, P53A, V87S, A111V, E113N, | MG137-9v6 |
| | P114S, A116R, S124N, D127N, E128Y, | |
| | S151C, F154Y, R157P, S172I, E173N | |
| 1581 | E12R, P37A, V71S, A95V, E97N, P98S, | MG137-11v7 |
| | S100R, R108N, D111N, A112Y, S135C, | |
| | F138Y, R141P, R156I, E157N | |
| 1582 | A29R, R42L, P54A, V88S, A112V, E114N, | MG137-12v8 |
| | P115S, A117R, R125N, D128N, A129Y, | |
| | Q152C, F155Y, R158P | |
| 1583 | A20R, P45A, V79S, T103V, E105N, | MG137-13v9 |
| | P106S, R116N, D119N, T120Y, S144C, | |
| | F147Y, P150R | |
| 1584 | A22R, R35L, V47A, V81S, A105V, | MG137-15v10 |
| | E107N, P108S, A110R, A118N, D121N, | |
| | Q122Y, Q145C, F148Y, R151P | |
| 1585 | A27R, R40L, P52A, V86S, T110V, E112N, | MG137-5v11 |
| | P113S, A115R, R123N, E126N, Q127Y, | |
| | S150C, F153Y, R156P | |
| 1586 | A29R, R42L, P54A, V88S, A112V, E114N, | MG137-14v12 |
| | P115S, A117R, R125N, E128N, Q129Y, | |
| | Q152C, F155Y, R158P | |
| 1587 | A21R, R34L, P46A, V80S, A104V, E106N, | MG137-16v13 |
| | P107S, Y109R, R117N, D120N, S121Y, | |
| | R144C, F147Y, R150P | |
| 1588 | A26R, P51A, V85S, A109V, E111N, | MG137-8v14 |
| | P112S, S114R, K122N, D125N, N126Y, | |
| | S149C, F152Y, R155P, G167I, P168N | |
| 1589 | F20R, A34L, P46A, V80S, A104V, E106N, | MG137-3v15 |
| | P107S, T109R, A120N, Q121Y, K144C, | |
| | F147Y, K150P | |
| 1590 | K21R, G34L, V46A, V80S, L82F, A104V, | MG68-55v1 |
| | D106N, P107S, A109R, Q117N, T120N, | |
| | L121Y, T144C, F147Y, K150P, A153V, | |
| | K154F, H155N | |
| 1591 | W21R, G35L, S47A, V81S, L83F, A105V, | MG68-27v2 |
| | D107N, P108S, N110R, P120N, L121Y, | |
| | K144C, F147Y, R150P, E153V, T154F, | |
| | E163I, E164N | |
| 1592 | Y12R, A26L, S38A, D41L, V72S, L74F, | MG68-52v3 |
| | A96V, D98N, L99S, T101R, S112N, | |
| | D113Y, S136C, F139Y, R142P, Q145V, | |
| | K146F, K147N | |
| 1593 | Y22R, S36L, P48A, S51L, V82S, L84F, | MG68-15v4 |
| | A106V, D108N, P109S, T111R, D119N, | |
| | S122N, V123Y, R146C, F149Y, R152P, | |
| | E155V, G156F, K157N, R167I, P168N | |
| 1594 | Y22R, S36L, T48A, D51L, V82S, L84F, | MG68-58v5 |
| | A106V, D108N, P109S, T111R, C119N, | |
| | A122N, N123Y, R146C, F149Y, R152P, | |
| | G155V, S156F, K157N | |
| 1595 | A18R, I31L, P43A, T46L, V77S, L79F, | MG68-25v6 |
| | A101V, D103N, P104S, A106R, D114N, | |
| | S118N, D119Y, R142C, F145Y, K148P, | |
| | S151V, P152F, R153N, D167I, N168N | |
| 1596 | G47R, G60L, P72A, V106S, L108F, | MG68-18v7 |
| | A130V, D132N, P133S, T135R, A143N, | |
| | T146N, D147Y, K170C, F173Y, R176P, | |
| | H179V, S180F, P181N, T190I, P191N | |
| 1597 | Y26R, E40L, T52A, D55L, V86S, L88F, | MG68-45v8 |
| | A110V, D112N, L113S, T115R, D127Y, | |
| | S150C, F153Y, R156P, M159V, Q160F, | |
| | K161N, K179I, D180N | |
| 1598 | W40R, H53L, P65A, D68L, V99S, L101F, | MG68-13v9 |
| | A123V, D125N, P126S, T128R, D136N, | |
| | A139N, Q140Y, Q163C, F166Y, R169P, | |
| | R172V, A173F, R174N, D204A, E205N | |
| 1599 | W24R, R37L, S52L, V83S, L85F, A107B, | MG68-4v10 |
| | D109N, P110S, T112R, D120N, R123N, | |
| | H124Y, S147C, F150Y, R153P, G166I | |
| 1600 | F23R, H36L, R49A, V83S, L85F, A107V, | MG132-1v1 |
| | D109N, A110S, A112R, E120N, D124Y, | |
| | G147C, F150Y, K153P | |
| 1601 | D35R, S48L, R61A, V95S, L97F, C119V, | MG132-1v2 |
| | D121N, P122S, A124R, Q132N, S135N, | |
| | D136Y, S159C, F162Y, K165P | |
| 1602 | L12R, H25L, R39A, D42L, V73S, L75F, | MG132-1v3 |
| | C97V, D99N, P100S, A102R, Q110N, | |
| | S113N, D114Y, T137C, F140Y, K143P | |
| 1603 | L25R, R38L, R50A, D53L, V84S, L86F, | MG133-1v1 |
| | A108V, D110N, G121N, A124N, D125Y, | |
| | R149C, L155P, R158V, G159F, D160N | |
| 1604 | A13R, Q28L, R40A, D43L, V74S, L76F, | MG133-2v2 |
| | A98V, D100N, E111N, S114N, D115Y, | |
| | R138C, L144P | |
| 1605 | A37R, E52L, R64A, D67L, V98S, L100F, | MG133-7v3 |
| | A122V, D124N, E135N, D138N, D139Y, | |
| | R162C, L168P | |
| 1606 | A28R, Q43L, R55A, H58L, V89S, L91F, | MG133-4v4 |
| | A113V, D115N, E126N, D129N, D130Y, | |
| | R153C, L159P, Q162V, R163F, K164N | |
| 1607 | E27R, E42L, R54A, D57L, V88S, L90F, | MG133-12v5 |
| | A112V, D114N, A125N, S128N, D129Y, | |
| | R152C, R158P | |
| 1608 | A43R, G58L, R70A, D73L, V104S, L106F, | MG133-5v6 |
| | A128V, D130N, R141N, S144N, D145Y, | |
| | K168C, L174P, G177V, G178F, R179N | |
| 1609 | M25R, A40L, R52A, D55L, V86S, L88F, | MG133-9v7 |
| | A110V, D112N, R123N, Q126N, D127Y, | |
| | R150C, K156P, R159V, T160F, D161N | |
| 1610 | G36R, A51L, R63A, D66L, V97S, L99F, | MG133-14v8 |
| | A121V, D123N, A134N, Q137N, D138Y, | |
| | R161C, R167P | |
| 1611 | A24R, S39L, R51A, D54L, V85S, L87F, | MG133-8v9 |
| | A109V, D111N, G122N, T125N, D126Y, | |
| | S149C, R155P, A158V, D159F, K160N | |
| 1612 | A13R, C26L, R38A, D41L, V72S, L74F, | MG133-10v10 |
| | A96V, D98N, Q109N, S112N, E113Y, | |
| | K136C, R142P, G145V, G146F | |
| 1613 | A41R, H54L, R66A, E69L, V100S, L102F, | MG133-13v11 |
| | A124V, D126N, Q137N, S140N, D141Y, | |
| | R164C, L170P, R173V, R174F, R175N | |
| 1614 | A33R, K46L, R58A, A60L, V92S, L94F, | MG133-3v12 |
| | A116V, D118N, E129N, I132N, D133Y, | |
| | R156C, R162P, I165V, N166F, R167N | |
| 1615 | A33R, R46L, R58A, N61L, V92S, L94F, | MG133-6v13 |
| | A116V, D118N, E129N, S132N, D133Y, | |
| | K156C, R162P, I165V, N166F, R167N | |
| 1616 | S22R, R35L, R47A, W50L, V81S, L83F, | MG133-11v14 |
| | I105V, D107N, R118N, D121N, T122Y, | |
| | Q154C, R151P, K154V, D155F, K156N | |
| 1617 | E31R, I44L, P56A, R59L, L92F, A114V, | MG136-1v1 |
| | D116N, I117S, F119R, R127N, D130N, | |
| | S131Y, R154C, L157Y, A160P | |
| 1618 | E18R, I31L, P43A, L79F, A101V, D103N, | MG136-6v2 |
| | L104S, F106R, R114N, D117N, S118Y, | |
| | K141C, F144Y, R147P | |
| 1619 | A27R, A41L, P53A, M56L, V87S, L89F, | MG136-12v3 |
| | A111V, D113N, L114S, F116R, R124N, | |
| | D127N, S128Y, E151C, F154Y, R157P | |
| 1620 | G12R, A25L, T37A, D40L, I72F, A94V, | MG136-2v4 |
| | D96N, E97S, A99R, R107N, D110N, | |
| | T111Y, Q134C, F137Y, R140P | |
| 1621 | D38L, T50A, D53L, I86F, A108V, D110N, | MG136-3v5 |
| | E111S, A113R, S121N, T125Y, Q148C, | |
| | F151Y, R154P | |
| 1622 | A22R, A36L, P48A, N51L, I84F, S106V, | MG136-9v6 |
| | D108N, E109S, F111R, R119N, D122N, | |
| | S123Y, Q146C, F149Y, R152P | |
| 1623 | E20R, A34L, T46A, A49L, T80S, I82F, | MG136-10v7 |
| | A104V, D106N, E107S, F109R, D120N, | |
| | N121Y, Q144C, F147Y, K150P, F153V, | |
| | Q154F, K155N | |
| 1624 | E12R, G26L, T38A, D41L, I74F, A96V, | MG136-11v8 |
| | D98N, E99S, F101R, K109N, S112N, | |
| | G113Y, T135C, R141P | |
| 1625 | S23R, Y37L, R51A, D54L, V85S, L87F, | MG129-1v1 |
| | A109V, D111N, P112S, A114R, D122N, | |
| | R149C, F152Y, L155P | |
| 1626 | E18R, H31L, R43A, D46L, V77S, L79F, | MG129-2v2 |
| | A101V, D103N, P104S, A106R, E117N, | |
| | E118Y, K141C, F144Y, L147P | |
| 1627 | G21R, F34L, R46A, D49L, V80S, L82F, | MG129-11v3 |
| | T104V, D106N, P107S, A109R, E120N, | |
| | E121Y, S144C, F147Y, L150P | |
| 1628 | A22R, H35L, R47A, D50L, V81S, L83F, | MG129-3v4 |
| | A105V, D107N, P108S, A110R, D118N, | |
| | S121N, D122Y, R145C, F148Y, R151P | |
| 1629 | A25R, R50A, D53L, V84S, L86F, A108V, | MG129-7v5 |
| | D110N, P111S, A113R, D121N, A124N, | |
| | D125Y, R148C, F151Y, R154P | |
| 1630 | G12R, R37A, G40L, V71S, L73F, A95V, | MG129-4v6 |
| | D97N, P98S, A100R, D108N, Q111N, | |
| | D112Y, R135C, F138Y, R141P | |
| 1631 | A20R, F33L, R45A, A48L, V79S, L81F, | MG129-9v7 |
| | A103V, D105N, P105S, A108R, A116N, | |
| | T119N, D120Y, K143C, F146Y, K149P | |
| 1632 | A12R, R25L, R37A, D40L, V71S, L73F, | MG129-10v8 |
| | C95V, D97N, P98S, G100R, D108N, | |
| | Q111N, V112Y, K135C, F138Y, L141P | |
| 1633 | G15R, S28L, R40A, D43L, V74S, L76F, | MG129-12v9 |
| | A98V, D100N, A101S, Q103R, G111N, | |
| | K132C, F135Y, L138P | |
| 1634 | A19R, H32L, R46A, D49L, V80S, L82F, | MG130-3v1 |
| | P107S, Q117N, D121Y, K144C, V147Y, | |
| | Q150P, L153V, G154F, K155N | |
| 1635 | G32R, H45L, R57A, D60L, V90S, Q92F, | MG130-1v2 |
| | C114V, P117S, A119R, Q127N, T130N, | |
| | D131Y, F157Y, L160P, G163V, P164F, | |
| | E165N | |
| 1636 | A59R, A92L, R105A, D108L, V138S, | MG130-5v3 |
| | Q140F, C162V, P165S, A167R, S175N, | |
| | S178N, D179Y, F205Y, L208P, G211V, | |
| | P212F, T213N | |
| 1637 | G36R, I49L, R61A, S64L, V94S, Q96F, | MG130-2v4 |
| | C118V, P121S, A123R, E131N, T134N, | |
| | D135Y, F161Y, L164P, N167V, G168F, | |
| | R169N | |
| 1638 | L18R, H31L, R45A, A48L, V79S, L81F, | MG130-4v5 |
| | C103V, D105N, P106S, A108R, E119N, | |
| | D120Y, V145Y, R158P, S161V, T162F, | |
| | T163N | |

In Vitro Activity of Novel ADA Variants from MG129-MG137 and MG68 families

### In Vitro Deaminase In-Gel Assay

[0487] Linear templates for candidate deaminases are amplified using plasmids from TWIST via PCR. Products are cleaned using SPRI beads (Lucigen) and eluted in 10 mM tris. Enzymes are then expressed in PURExpress(NEB) at 37° C. for 2 hours. Deamination reactions are prepared by mixing PURExpress reactions (2 μL) with a 10 μM DNA substrate (IDT, SEQ ID NO: 1645) labeled with Cy5.5, 1 U EndoV(NEB), and 10×NEB4 Buffer. Reactions are incubated at 37° C. for 20 hours. Samples are quenched by adding 4 units of proteinase K (NEB) and incubated at 55° C. for 10 minutes. The reaction is further treated by addition of 11 μL of 2× RNA loading dye and incubated at 75° C. for 10 minutes. All reaction conditions are analyzed by gel electrophoresis in a 10% (TBE-urea) denaturing gel (Biorad). DNA bands are visualized by a Chemi-Doc imager (Biorad) and band intensities are quantified using BioRad Image Lab v6.0. Successful deamination is observed by the visualization of an intermediate fluorescently labeled band in the gel.

### In Vitro NGS-Based Screening for In Vitro Deamination

[0488] Linear templates for candidate deaminases are amplified using plasmids from TWIST via PCR. Products are cleaned using SPRI beads (Lucigen) and eluted in 10 mM tris. Enzymes are then expressed in PURExpress(NEB) at 37° C. for 2 hours. Deamination reactions are prepared by mixing PURExpress reactions (2 μL) with a 250 nM single-stranded DNA substrate (IDT, SEQ ID NO: 1646) and 1 U of NEB4 buffer. Reactions are incubated at 37° C. for 2 hours. Reactions are quenched by incubating at 95° C. for 10 minutes, adding 90 μL of water at 95° C., and placing on ice for 2 minutes. 1 μL of digest reaction is used per PCR reaction (oligos IDT). Reactions are then cleaned using column purification (Zymo), eluted in 10 mM tris, and sequenced.

### Example 37—Engineering of ABE Using nMG34-1 (D10A) Nickase

### Plasmid Construction

[0489] DNA fragments of genes were either synthesized at Twist Bioscience or Integrated DNA Technologies (IDT). Plasmid DNA was amplified in Endura electrocompetent cells (Lucigen) and isolated by QIAprep Spin Miniprep Kit (Qiagen). Vector backbones were prepared by restriction enzyme digestion of plasmids. Inserts were amplified by Q5 High-Fidelity DNA polymerase (New England Biolabs) using primers ordered either from Elim BIOPHARM or IDT. Both vector backbones and inserts were purified by gel extraction using the Gel DNA Recovery Kit (Zymo Research). One or multiple DNA fragments were assembled into the vectors through NEBuilder HiFi DNA assembly (New England Biolabs). The plasmid sequence used for expression of nMG34-1 (D10A) adenine base editor and sgRNA are shown in SEQ ID NO: 1422.

### Cell Culture, Transfections, Next Generation Sequencing, and Base Edit Analysis

[0490] HEK293T cells were grown and passaged in Dulbecco's Modified Eagle's Medium plus GlutaMAX (gibco) supplemented with 10% (v/v) fetal bovine serum (gibco) at 37° C. with 5% CO₂. 2.5×10⁴ cells (passage 3-8) were seeded on 96-well cell culture plates treated for cell attachment (Costar), grown for 20 to 24 h, and the spent media were refreshed with new media right before transfection. For the dual plasmid system, 300 ng expression plasmid along with 100 ng guide plasmid were transfected using 1 μL lipofectamine 2000 (ThermoFisher Scientific) per well according to the manufacturer's instructions. For the single plasmid system, 300 ng plasmid carrying the base editor gene and guide RNA was transfected using 1 μL lipofectamine. Transfected cells were grown for 3 days, harvested, and gDNA was extracted with QuickExtract (Lucigen) according to the manufacturer's instructions. Targeted regions for base edits were amplified using Q5 High-Fidelity DNA polymerase (New England Biolabs) with primers and extracted DNA as the templates. PCR products were purified by HighPrep PCR Clean-up System (MAGBIO) according to the manufacturer's instructions. After 72 hours, individual wells were visually assessed for cell viability based on cell growth and presence of floating cells in media. Following the visual assessment of cell viability, cells were harvested and genomic DNA was extracted. PCR primers appropriate for use in NGS-based DNA sequencing were generated, optimized, and used to amplify the individual target sequences for each guide RNA. The amplicons were sequenced on an Illumina MiSeq machine and analyzed with a proprietary Python script to measure gene editing.

### Results

[0491] MG68-4 is predicted to be a tRNA adenosine deaminase. As the natural enzymes of E. coli TadA (EcTadA) and S. aureus TadA (SaTadA) are both dimers, MG68-4 was suspected be a dimer as well. It has been shown that using a protein fusion of engineered EcTadA homodimer can increase the editing efficiency (Gaudelli, N. M. et al. Programmable base editing of AT to GC in genomic DNA without DNA cleavage. Nature 2017, 551, 464-471). As such, a series of MG68-4 (D109N) homodimers was designed and fused with nMG34-1 (D10A). To design the linkers between two monomers, the length between the N-terminus of the first monomer and the C-terminus of the second monomer was estimated using Visual Molecular Dynamics (VMD) (Humphrey, W. et al. VMD—Visual Molecular Dynamics, J Mol. Graph. 1996, 14, 33-38), and the model suggested 5.2 nm (FIG. 46A). The fusions were optimized by varying linker lengths ranging from 32 to 64 amino acids, and a negative control with 5 amino acids was included (SEQ ID NOs: 1356-1362). The result indicated that the best linker length was 64 amino acids, which might provide enough flexibility to accommodate the distance between monomers. With this optimized linker, an increase of 87% editing was obtained compared to the monomeric design of MG68-4 fused with nMG34-1 (D109N) (FIG. 46B).

[0492] Previously, MG68-4 (D109N)-nMG34-1 (D10A) was observed to have C to G edit on the sixth position when using guide 633 (SEQ ID NO: 1416). To reduce the promiscuous activity toward cytosine, the approach that was used by Jeong (Jeong, Y. K. et al. Adenine base editor engineering reduces editing of bystander cytosines. Nat. Biotechnol. 2021, 39, 1426-1433) was applied, where Q was installed at D108 position in EcTadA. By incorporating Q into the D109 position of MG68-4, the ABE showed 64% reduction of C to G edit on C6 position using guide 633 while maintaining comparable A to G edit on A8 position using guide 634 (SEQ ID NO: 1417). To increase editing efficiency, two beneficial mutations (H129N and D7G/E10G) were incorporated along with D109Q. The results showed that the editing efficiencies of new mutants were reduced, suggesting incompatibility of mutations (SEQ ID NOs: 1639-1644) (FIG. 47).

### Example 38—Engineering of ABE Using nMG3-6/3-8 (D13A) Nickase

### Plasmid Construction

[0493] DNA fragments of genes were either synthesized at Twist Bioscience or Integrated DNA Technologies (IDT). Plasmid DNA was amplified in Endura electrocompetent cells (Lucigen) and isolated by QIAprep Spin Miniprep Kit (Qiagen). Vector backbones were prepared by restriction enzyme digestion of plasmids. Inserts were amplified by Q5 High-Fidelity DNA polymerase (New England Biolabs) using primers ordered either from Elim BIOPHARM or IDT. Both vector backbones and inserts were purified by gel extraction using the Gel DNA Recovery Kit (Zymo Research). One or multiple DNA fragments were assembled into the vectors through NEBuilder HiFi DNA assembly (New England Biolabs). The plasmid sequences used for expression of the nMG3-6/3-8 adenine base editor and sgRNA are shown in SEQ ID NO: 1423.

### Cell Culture, Transfections, Next Generation Sequencing, and Base Edit Analysis

[0494] HEK293T cells were grown and passaged in Dulbecco's Modified Eagle's Medium plus GlutaMAX (gibco) supplemented with 10% (v/v) fetal bovine serum (gibco) at 37° C. with 5% CO₂. 2.5×10⁴ cells (passage 3-8) were seeded on 96-well cell culture plates treated for cell attachment (Costar), grown for 20 to 24 h, and the spent media were refreshed with new media right before transfection. For the dual plasmid system, 300 ng expression plasmid along with 100 ng guide plasmid were transfected using 1 μL lipofectamine 2000 (ThermoFisher Scientific) per well according to the manufacturer's instructions. For the single plasmid system, 300 ng plasmid carrying the base editor gene and guide RNA was transfected using 1 μL lipofectamine. Transfected cells were grown for 3 days, harvested, and gDNA was extracted with QuickExtract (Lucigen) according to the manufacturer's instructions. Targeted regions for base edits were amplified using Q5 High-Fidelity DNA polymerase (New England Biolabs) with primers and extracted DNA as the templates. PCR products were purified by HighPrep PCR Clean-up System (MAGBIO) according to the manufacturer's instructions. After 72 hours, individual wells were visually assessed for cell viability based on cell growth and presence of floating cells in media. Following the visual assessment of cell viability, cells were harvested and genomic DNA extracted. PCR primers appropriate for use in NGS-based DNA sequencing were generated, optimized, and used to amplify the individual target sequences for each guide RNA. The amplicons were sequenced on an Illumina MiSeq machine and analyzed with a proprietary Python script to measure gene editing.

### Results

[0495] Through directed evolution of the predicted tRNA adenosine deaminase of MG68-4 (D109N)-nMG34-1 (D10A) in E. coli, two mutants (D109N/D7G/E10G and D109N/H129N) were observed to outperform the D109N mutant for higher editing A to G efficiency in HEK293T cells. Through rational design based on the reported mutations of EcTadA (Gaudelli, N. M. et al. Programmable base editing of AT to GC in genomic DNA without DNA cleavage. Nature 2017, 551, 464-471; Gaudelli N. M. et al. Directed evolution of adenine base editors with increased activity and therapeutic application. Nat. Biotechnol. 2020, 38, 892-900; and Richter M. F. et al. Phage-assisted evolution of an adenine base editor with improved Cas domain compatibility and activity. Nat. Biotechnol. 2020, 38, 883-891) for MG68-4, five mutants (V83S, L85F, T112R, D148R, and A155R) fused with nMG34-1 (D10A) were observed to be beneficial on top of D109N mutation. All identified mutations were combined, and a combinatorial library was designed to interrogate enzymatic performance of the adenosine deaminase (Table 13) (SEQ ID NOs: 1363-1409).

TABLE 13
Mutations installed in the combinatorial library of MG68-4. All Mg68-4
variants are inserted into 3-68_DIV30_M_RDr1v1_B

| Variant | Mutation |
|---|---|
| CL1 | WT |
| CL2 | D109N |
| CL3 | D7G/E10G/D109N |
| CL4 | V83S/D109N |
| CL5 | L85F/D109N |
| CL6 | D109N/T112R |
| CL7 | D109N/H129N |
| CL9 | D109N/A155R |
| CL10 | D7G/E10G/V83S/D109N |
| CL11 | D7G/E10G/L85F/D109N |
| CL12 | D7G/E10G/T112R/D109N |
| CL13 | D7G/E10G/H129N/D109N |
| CL14 | D7G/E10G/D148R/D109N |
| CL15 | D7G/E10G/A155R/D109N |
| CL16 | V83S/L85F/D109N |
| CL17 | V83S/D109N/T112R |
| CL18 | V83S/D109N/H129N |
| CL20 | V83S//D109N/A155R |
| CL22 | L85F/D109N/T112R |
| CL23 | L85F/D109N/H129N |
| CL25 | L85F/D109N/A155R |
| CL28 | D109N/T112R/H129N |
| CL29 | D109N/T112R/D148R |
| CL30 | D109N/T112R/A155R |
| CL34 | D109N/H129N/D148R |
| CL35 | D109N/H129N/A155R |
| CL40 | D109N/D148R/A155R |
| CL56 | V83S/L85F/D109N/T112R |
| CL57 | V83S/L85F/D109N/H129N |
| CL58 | V83S/D109N/T112R/H129N |
| CL59 | V83S/L85F/D109N/H129N |
| CL60 | V83S/L85F/D109N/T112R/H129N |
| CL61 | D7G/E10G/V83S/L85F/D109N/T112R/ |
| | H129N/D148R/A155R |
| CL62 | E10G/V83S/L85F/D109N/T112R/H129N/ |
| | D148R/A155R |
| CL63 | D7G/V83S/L85F/D109N/T112R/H129N/ |
| | D148R/A155R |
| CL64 | D7G/E10G/L85F/D109N/T112R/H129N/ |
| | D148R/A155R |
| CL65 | D7G/E10G/V83S/D109N/T112R/H129N/ |
| | D148R/A155R |
| CL66 | D7G/E10G/V83S/L85F/D109N/H129N/ |
| | D148R/A155R |
| CL67 | D7G/E10G/V83S/L85F/D109N/T112R/ |
| | D148R/A155R |
| CL68 | D7G/E10G/V83S/L85F/D109N/T112R/ |
| | H129N/A155R |
| CL69 | D7G/E10G/V83S/L85F/D109N/T112R/ |
| | H129N/D148R |
| CL70 | L85F/D109N/T112R/H129N/D148R/A155R |
| CL71 | V83S/D109N/T112R/H129N/D148R/A155R |
| CL72 | V83S/L85F/D109N/H129N/D148R/A155R |
| CL73 | V83S/L85F/D109N/T112R/D148R/A155R |
| CL74 | V83S/L85F/D109N/T112R/H129N/A155R |
| CL75 | V83S/L85F/D109N/T112R/H129N/D148R |

[0496] All variants were inserted into 3-68_DIV30_M nickase chassis, where 3-68, DIV, and M stood for MG3-6/3-8 nickase, domain inlaid version 30, and monomer, respectively. The screening of the resulting ABEs revealed that 27 variants outperformed CL2 (MG68-4 (D109M)). The highest editing efficiency was observed when V83S/L85F/D109N were combined together, and the effect of improving editing was supported by increased activities of V83S/D109N and L85F/D109N observed in CL4 and CL5, respectively. In addition to CL16, CL22 also demonstrated high editing efficiency. In this variant, the mutation of V83S was replaced by T112R in the V83S/L85F/D109N triple mutant (FIG. 48).

[0497] In order to increase A to G base editing percentage of the 3-68_DIV30_M adenine base editor, a 3-68_DIV30_D ABE was designed in which two MG68-4 (D109N) monomers are connected by a 65AA linker and inlaid within the 3-68 scaffold at the same V30 insertion site as 3-68_DIV30_M (SEQ ID NOs: 1410-1411). This dimeric form of the 3-68 ABE increased editing at position A10 of a site within the TRAC gene when co-transfected with a plasmid expressing sgRNA68 (SEQ ID NO: 1421) from 8% (3-68_DIV30_M) to 18% (3-68_DIV30_D) sgRNA68. The influence of two different MG68-4 variants (H129N or D7G/E10G) was also tested on 3-68_DIV30_M and 3-68_DIV30_D already containing D109N (SEQ ID NOs: 1412-1415). For 3-68_DIV30_D, the H129N or D7G/E10G mutation was installed within the second MG68-4 D109N, and the first deaminase remained MG68-4 D109N. The H129N and D7G/E10G variants were identified using an error-prone PCR library of MG68-4 fused to MG34-1 and selecting for A to G conversion in E. Coli. After addition of either the H129N or D7G/E10G variants, in both the monomeric and dimeric MG68-4 D109N, editing was slightly lower as compared to the 3-68_DIV30_MG68-4 D109N ABE in the equivalent monomeric/dimeric form (FIG. 49).

### Example 39—Engineering of nMG35-1 as a Base Editor

E. coli Selection

[0498] A nickase MG35-1 containing a D59A mutation with a C-terminally fused TadA*-(7.10) monomer along with a C-terminus SV40 NLS was constructed to test MG35-1 adenine base editor (ABE) activity (SEQ ID NOs: 1424-1426). This ABE was tested with its compatible sgRNA containing either a 20 nucleotide spacer sequence targeting the chloramphenicol acetyltransferase (CAT) gene or a non-targeting spacer sequence of the same 20 nucleotides in a scrambled order (SEQ ID NOs: 1429-1430). The CAT gene contains a H193Y mutation that renders the CAT gene nonfunctional against chloramphenicol selection. The ABE, sgRNA, and non-functional CAT gene were cloned into a pET-21 backbone containing Ampicillin resistance. For both constructs, 10 ng of the plasmid was transformed into 25 μL of BL21(DE3) (Lucigen) E. Coli cells and the cells were left shaking at 37° C. in 450 μL of recovery media for 90 minutes. Next, 70 μL of recovery media containing transformed cells was plated onto plates containing chloramphenicol concentrations of 0, 2, 3, 4, and 8 μg/mL. The 0 μg/mL plate was used as a transformation control. Plates also contained 100 μg/mL Carbecillin and 0.1 mM IPTG. Plates were left at 37° C. for 40 hours. Colonies were sequenced by Elim Biopharmaceuticals, Inc.

### Results

[0499] In order to determine whether the SMART II enzymes can be used as base editors, an adenine base editor (ABE) was constructed by fusing a TadA*-(7.10) monomer to the C-terminus of a nickase form of MG35-1 containing a D59A mutation (SEQ ID NO: 1424). The A to G editing of this ABE was tested in a positive selection single-plasmid E. Coli system in which the ABE is required to revert a chloramphenicol acetyltransferase (CAT) gene containing a Y193 mutation back to H193 in order for the E. Coli cell to survive chloramphenicol selection. This plasmid contained an sgRNA with a spacer either targeting the mutant CAT gene or a scrambled, non-targeting spacer region. An enrichment of colonies was detected with E. Coli transformed with the MG35-1 ABE targeting the CAT gene when plated on plates containing 2, 3, and 4 μg/mL of chloramphenicol, while no colonies grew on the plate containing 8 μg/mL of chloramphenicol. Sanger sequencing confirmed that 26/30 colonies picked from the 2, 3, and 4 μg/mL plates transformed with the targeting MG35-1 ABE contained the expected Y193H reversion. It is likely that the 4 colonies without the reverted CAT sequence contain more unedited than edited copies of the selection construct as one reverted CAT gene is sufficient to confer colony survival. No colonies were seen on the 2, 3, 4, and 8 μg/mL plates plated with E. Coli transformed with the non-targeting MG35-1 ABE. While the 0 μg/mL condition was used as a transformation control, Sanger sequencing found that 1/10 colonies picked from the 0 μg/mL plate transformed with the targeting MG35-1 ABE contained the Y193H reversion, indicating a detectable level of editing even without chloramphenicol selection. The colony growth enrichment from chloramphenicol selection of the targeting MG35-1 ABE condition from the CAT gene Y193H reversion confirms that the MG35-1 nickase can function as an ABE in E. Coli cells (FIG. 50).

### Example 40—Guide Screening for the nMG3-6/3-8 ABE in Mouse Hepatocytes

### Cell Culture, Transfections, Next Generation Sequencing, and Base Edit Analysis for Screens

[0500] Hepa1-6 cells were grown and passaged in Dulbecco's Modified Eagle's Medium plus 1×NEAA (gibco) supplemented with 10% (v/v) fetal bovine serum (gibco) and 1% pen-strep at 37° C. with 5% CO₂. 1×10⁴ cells were nucleofected with 500 ng IVT mRNA and 150 pmol chemically-synthesized sgRNA (IDT) using a Lonza-4D nucleofector (program EH-100). Cells were grown for 3 days, harvested, and gDNA was extracted with QuickExtract (Lucigen) according to the manufacturer's instructions. Targeted regions for base edits were amplified using Q5 High-Fidelity DNA polymerase (New England Biolabs) with primers appropriate for use with NGS-based DNA sequencing (SEQ ID NOs: 1493-1554) and extracted DNA as the templates. PCR products were purified by HighPrep PCR Clean-up System (MAGBIO) according to the manufacturer's instructions. Amplicons were sequenced on an Illumina MiSeq machine and analyzed with a proprietary Python script to measure gene editing.

mRNA Production

[0501] Sequences for base editor mRNA were codon optimized for human expression (GeneArt), then synthesized and cloned into a high copy ampicillin plasmid (Twist Biosciences). Synthesized constructs encoding T7 promoter, UTRs, base editor ORF, and NLS sequences were digested from the Twist backbone with HindII and BamHI (NEB), and ligated into a pUC19 plasmid backbone (SEQ ID NO: 1555) with T4 DNA ligase and 1× reaction buffer (NEB). The complete base editor mRNA plasmid comprised an origin of replication, ampicillin resistance cassette, the synthesized construct, and an encoded polyA tail. Base editor mRNA was synthesized via in vitro transcription (IVT) using the linearized base editor mRNA plasmid. This plasmid was linearized by incubation at 37° C. for 16 hours with SapI (NEB) enzyme. The linearization reaction comprised a 50 μL reaction containing 10 μg pDNA, 50 units Sap I, and 1× reaction buffer. The linearized plasmid was purified with Phenol:Chloroform:Isoamyl Alcohol (25:24:1, v/v), precipitated in EtOH, and resuspended in nuclease-free water at an adjusted concentration of 500 ng/μL. The IVT reaction to generate base editor mRNA was performed at 50° C. for 1 hr under the following conditions: 1 μg linearized plasmid; 5 mM ATP, CTP, GTP (NEB), and N1-methyl pseudo-UTP (TriLink); 18750 U/mL Hi-T7 RNA Polymerase (NEB); 4 mM CleanCap AG (TriLink); 2.5 U/mL Inorganic E. coli pyrophosphatase (NEB); 1000 U/mL murine RNase Inhibitor (NEB); and 1× transcription buffer. After 1 hr, IVT was stopped, and plasmid DNA was digested with the addition of 250 U/mL DnaseI (NEB) and incubated for 10 min at 37° C. Purification of base editor mRNA was performed using an Rneasy Maxi Kit (Qiagen) using the standard manufacturer's protocol. Transcript concentration was determined by UV (NanoDrop) and further analyzed by capillary gel electrophoresis on a Fragment Analyzer (Agilent).

### Results

[0502] To test the activity of the engineered dimeric form of the 3-68 ABE described above, 527 MG3-6/3-8 chemically-synthesized guides targeting four therapeutically relevant loci in the mouse genome were designed and purchased from IDT. These guides were co-transfected with in vitro synthesized mRNA in Hepa1-6 (a mouse immortalized mouse hepatocyte cell line) via nucleofection, and A to G conversion was assayed three days post-nucleofection. Guides were rank-ordered by percent total deamination within the spacer region, and deeper analysis of active guides was restricted to guides with >80% in-spacer deamination and with high number of NGS reads. Altogether, total spacer A to G deamination above 1000 was observed at 31 distinct guides across three loci (SEQ ID NOs: 1431-1492; FIGS. 51-53) with two guides showing conversion rates of 89m and 95% (Apoa1 D11 and Apoa1 F12, respectively).

TABLE 13A
Guide sequences used in Example 40

| SEQ | | |
|---|---|---|
| ID | | |
| NO: | sgRNA name | Sequence |
| 1431 | MG3-6/3-8 | mC*mU*mG*rGrUrGrUrGrGrUrArCrUrCrGrUrUrCrArArGrG |
| | mApoa1 BE F12 | rGrUrUrGrArGrArArUrCrGrArArArGrArUrUrCrUrUrArArUr |
| | | ArArGrGrCrArUrCrCrUrUrCrCrGrArUrGrCrUrGrArCrUrUrCr |
| | | UrCrArCrCrGrUrCrCrGrUrUrUrUrCrCrArArUrArGrGrArGrCr |
| | | GrGrGrCrGrGrUrArUrGrU*mU*mU*mU |
| 1432 | MG3-6/3-8 | mA*mC*mU*rArUrGrGrCrGrCrArGrGrUrCrCrUrCrCrArGrCr |
| | mApoa1 BE D11 | GrUrUrGrArGrArArUrCrGrArArArGrArUrUrCrUrUrArArUrA |
| | | rArGrGrCrArUrCrCrUrUrCrCrGrArUrGrCrUrGrArCrUrUrCrU |
| | | rCrArCrCrGrUrCrCrGrUrUrUrUrCrCrArArUrArGrGrArGrCrG |
| | | rGrGrCrGrGrUrArUrGrU*mU*mU*mU |
| 1433 | MG3-6/3-8 | mU*mU*mG*rGrGrUrGrArGrArCrArGrGrArGrArUrGrArArC |
| | mApoa1 BE C5 | rGrUrUrGrArGrArArUrCrGrArArArGrArUrUrCrUrUrArArUr |
| | | ArArGrGrCrArUrCrCrUrUrCrCrGrArUrGrCrUrGrArCrUrUrCr |
| | | UrCrArCrCrGrUrCrCrGrUrUrUrUrCrCrArArUrArGrGrArGrCr |
| | | GrGrGrCrGrGrUrArUrGrU*mU*mU*mU |
| 1434 | MG3-6/3-8 | mU*mC*mU*rCrCrUrGrGrArArArArCrUrGrGrGrArCrArCrUr |
| | mApoa1 BE A4 | GrUrUrGrArGrArArUrCrGrArArArGrArUrUrCrUrUrArArUrA |
| | | rArGrGrCrArUrCrCrUrUrCrCrGrArUrGrCrUrGrArCrUrUrCrU |
| | | rCrArCrCrGrUrCrCrGrUrUrUrUrCrCrArArUrArGrGrArGrCrG |
| | | rGrGrCrGrGrUrArUrGrU*mU*mU*mU |
| 1435 | MG3-6/3-8 | mA*mG*mG*rArArCrGrGrCrUrGrGrGrCrCrCrArUrUrGrArCr |
| | mApoa1 BE F4 | GrUrUrGrArGrArArUrCrGrArArArGrArUrUrCrUrUrArArUrA |
| | | rArGrGrCrArUrCrCrUrUrCrCrGrArUrGrCrUrGrArCrUrUrCrU |
| | | rCrArCrCrGrUrCrCrGrUrUrUrUrCrCrArArUrArGrGrArGrCrG |
| | | rGrGrCrGrGrUrArUrGrU*mU*mU*mU |
| 1436 | MG3-6/3-8 | mC*mU*mG*rGrGrArUrArArCrCrUrGrGrArGrArArArGrArA |
| | mApoa1 BE A5 | rGrUrUrGrArGrArArUrCrGrArArArGrArUrUrCrUrUrArArUr |
| | | ArArGrGrCrArUrCrCrUrUrCrCrGrArUrGrCrUrGrArCrUrUrCr |
| | | UrCrArCrCrGrUrCrCrGrUrUrUrUrCrCrArArUrArGrGrArGrCr |
| | | GrGrGrCrGrGrUrArUrGrU*mU*mU*mU |
| 1437 | MG3-6/3-8 | mC*mC*mU*rGrGrUrGrUrGrGrUrArCrUrCrGrUrUrCrArArG |
| | mApoa1 BE E12 | rGrUrUrGrArGrArArUrCrGrArArArGrArUrUrCrUrUrArArUr |
| | | ArArGrGrCrArUrCrCrUrUrCrCrGrArUrGrCrUrGrArCrUrUrCr |
| | | UrCrArCrCrGrUrCrCrGrUrUrUrUrCrCrArArUrArGrGrArGrCr |
| | | GrGrGrCrGrGrUrArUrGrU*mU*mU*mU |
| 1438 | MG3-6/3-8 | mA*mG*mC*rArUrGrGrGrCrArUrCrArGrArCrUrArUrGrGrC |
| | mApoa1 BE A11 | rGrUrUrGrArGrArArUrCrGrArArArGrArUrUrCrUrUrArArUr |
| | | ArArGrGrCrArUrCrCrUrUrCrCrGrArUrGrCrUrGrArCrUrUrCr |
| | | UrCrArCrCrGrUrCrCrGrUrUrUrUrCrCrArArUrArGrGrArGrCr |
| | | GrGrGrCrGrGrUrArUrGrU*mU*mU*mU |
| 1439 | MG3-6/3-8 | mC*mU*mC*rCrUrGrGrArArArArCrUrGrGrGrArCrArCrUrCr |
| | mApoa1 BE B4 | GrUrUrGrArGrArArUrCrGrArArArGrArUrUrCrUrUrArArUrA |
| | | rArGrGrCrArUrCrCrUrUrCrCrGrArUrGrCrUrGrArCrUrUrCrU |
| | | rCrArCrCrGrUrCrCrGrUrUrUrUrCrCrArArUrArGrGrArGrCrG |
| | | rGrGrCrGrGrUrArUrGrU*mU*mU*mU |
| 1440 | MG3-6/3-8 | mG*mG*mA*rArCrGrGrCrUrGrGrGrCrCrCrArUrUrGrArCrUr |
| | mApoa1 BE G4 | GrUrUrGrArGrArArUrCrGrArArArGrArUrUrCrUrUrArArUrA |
| | | rArGrGrCrArUrCrCrUrUrCrCrGrArUrGrCrUrGrArCrUrUrCrU |
| | | rCrArCrCrGrUrCrCrGrUrUrUrUrCrCrArArUrArGrGrArGrCrG |
| | | rGrGrCrGrGrUrArUrGrU*mU*mU*mU |
| 1441 | MG3-6/3-8 | mG*mC*mC*rArCrArGrGrGrGrArCrArGrUrCrUrCrCrCrUrUr |
| | mApoa1 BE B2 | GrUrUrGrArGrArArUrCrGrArArArGrArUrUrCrUrUrArArUrA |
| | | rArGrGrCrArUrCrCrUrUrCrCrGrArUrGrCrUrGrArCrUrUrCrU |
| | | rCrArCrCrGrUrCrCrGrUrUrUrUrCrCrArArUrArGrGrArGrCrG |
| | | rGrGrCrGrGrUrArUrGrU*mU*mU*mU |
| 1442 | MG3-6/3-8 | mC*mA*mG*rCrGrArArCrArGrArUrGrCrGrCrGrArGrArGrCr |
| | mApoa1 BE D7 | GrUrUrGrArGrArArUrCrGrArArArGrArUrUrCrUrUrArArUrA |
| | | rArGrGrCrArUrCrCrUrUrCrCrGrArUrGrCrUrGrArCrUrUrCrU |
| | | rCrArCrCrGrUrCrCrGrUrUrUrUrCrCrArArUrArGrGrArGrCrG |
| | | rGrGrCrGrGrUrArUrGrU*mU*mU*mU |
| 1443 | MG3-6/3-8 | mA*mU*mU*rGrGrGrUrGrArGrArCrArGrGrArGrArUrGrArA |
| | mApoa1 BE B5 | rGrUrUrGrArGrArArUrCrGrArArArGrArUrUrCrUrUrArArUr |
| | | ArArGrGrCrArUrCrCrUrUrCrCrGrArUrGrCrUrGrArCrUrUrCr |
| | | UrCrArCrCrGrUrCrCrGrUrUrUrUrCrCrArArUrArGrGrArGrCr |
| | | GrGrGrCrGrGrUrArUrGrU*mU*mU*mU |
| 1444 | MG3-6/3-8 | mA*mG*mG*rGrArGrArCrUrGrUrCrCrCrCrUrGrUrGrGrCrUr |
| | mApoa1 BE G6 | GrUrUrGrArGrArArUrCrGrArArArGrArUrUrCrUrUrArArUrA |
| | | rArGrGrCrArUrCrCrUrUrCrCrGrArUrGrCrUrGrArCrUrUrCrU |
| | | rCrArCrCrGrUrCrCrGrUrUrUrUrCrCrArArUrArGrGrArGrCrG |
| | | rGrGrCrGrGrUrArUrGrU*mU*mU*mU |
| 1445 | MG3-6/3-8 | mC*mC*mU*rArCrCrUrUrGrArArCrGrArGrUrArCrCrArCrAr |
| | mApoa1 BE A8 | GrUrUrGrArGrArArUrCrGrArArArGrArUrUrCrUrUrArArUrA |
| | | rArGrGrCrArUrCrCrUrUrCrCrGrArUrGrCrUrGrArCrUrUrCrU |
| | | rCrArCrCrGrUrCrCrGrUrUrUrUrCrCrArArUrArGrGrArGrCrG |
| | | rGrGrCrGrGrUrArUrGrU*mU*mU*mU |
| 1446 | MG3-6/3-8 | mG*mG*mC*rCrCrArArGrGrArGrGrArGrGrArUrUrCrArArA |
| | mApoa1 BE F2 | rGrUrUrGrArGrArArUrCrGrArArArGrArUrUrCrUrUrArArUr |
| | | ArArGrGrCrArUrCrCrUrUrCrCrGrArUrGrCrUrGrArCrUrUrCr |
| | | UrCrArCrCrGrUrCrCrGrUrUrUrUrCrCrArArUrArGrGrArGrCr |
| | | GrGrGrCrGrGrUrArUrGrU*mU*mU*mU |
| 1447 | MG3-6/3-8 | mA*mG*mC*rArArGrArUrGrArArCrCrCrCrArGrUrCrCrCrAr |
| | mApoa1 BE E1 | GrUrUrGrArGrArArUrCrGrArArArGrArUrUrCrUrUrArArUrA |
| | | rArGrGrCrArUrCrCrUrUrCrCrGrArUrGrCrUrGrArCrUrUrCrU |
| | | rCrArCrCrGrUrCrCrGrUrUrUrUrCrCrArArUrArGrGrArGrCrG |
| | | rGrGrCrGrGrUrArUrGrU*mU*mU*mU |
| 1448 | MG3-6/3-8 | mC*mU*mA*rCrCrUrUrGrArArCrGrArGrUrArCrCrArCrArCr |
| | mApoa1 BE B8 | GrUrUrGrArGrArArUrCrGrArArArGrArUrUrCrUrUrArArUrA |
| | | rArGrGrCrArUrCrCrUrUrCrCrGrArUrGrCrUrGrArCrUrUrCrU |
| | | rCrArCrCrGrUrCrCrGrUrUrUrUrCrCrArArUrArGrGrArGrCrG |
| | | rGrGrCrGrGrUrArUrGrU*mU*mU*mU |
| 1449 | MG3-6/3-8 | mC*mA*mU*rGrCrUrGrGrArGrArCrGrCrUrUrArArGrArCrCr |
| | mApoa1 BE H8 | GrUrUrGrArGrArArUrCrGrArArArGrArUrUrCrUrUrArArUrA |
| | | rArGrGrCrArUrCrCrUrUrCrCrGrArUrGrCrUrGrArCrUrUrCrU |
| | | rCrArCrCrGrUrCrCrGrUrUrUrUrCrCrArArUrArGrGrArGrCrG |
| | | rGrGrCrGrGrUrArUrGrU*mU*mU*mU |
| 1450 | MG3-6/3-8 | mU*mC*mG*rCrGrArCrCrGrCrArUrGrCrGrCrArCrArCrArCr |
| | mApoa1 BE H6 | GrUrUrGrArGrArArUrCrGrArArArGrArUrUrCrUrUrArArUrA |
| | | rArGrGrCrArUrCrCrUrUrCrCrGrArUrGrCrUrGrArCrUrUrCrU |
| | | rCrArCrCrGrUrCrCrGrUrUrUrUrCrCrArArUrArGrGrArGrCrG |
| | | rGrGrCrGrGrUrArUrGrU*mU*mU*mU |
| 1451 | MG3-6/3-8 | mA*mC*mG*rArArUrUrCrCrArGrArArGrArArArUrGrGrArA |
| | mApoa1 BE F5 | rGrUrUrGrArGrArArUrCrGrArArArGrArUrUrCrUrUrArArUr |
| | | ArArGrGrCrArUrCrCrUrUrCrCrGrArUrGrCrUrGrArCrUrUrCr |
| | | UrCrArCrCrGrUrCrCrGrUrUrUrUrCrCrArArUrArGrGrArGrCr |
| | | GrGrGrCrGrGrUrArUrGrU*mU*mU*mU |
| 1452 | MG3-6/3-8 | mC*mU*mA*rGrCrCrUrGrArArUrCrUrCrCrUrGrGrArArArAr |
| | mApoal BE H3 | GrUrUrGrArGrArArUrCrGrArArArGrArUrUrCrUrUrArArUrA |
| | | rArGrGrCrArUrCrCrUrUrCrCrGrArUrGrCrUrGrArCrUrUrCrU |
| | | rCrArCrCrGrUrCrCrGrUrUrUrUrCrCrArArUrArGrGrArGrCrG |
| | | rGrGrCrGrGrUrArUrGrU*mU*mU*mU |
| 1453 | MG3-6/3-8 | mU*mG*mG*rGrCrCrCrArUrUrGrArCrUrCrGrGrGrArCrUrUr |
| | mApoa1 BE H4 | GrUrUrGrArGrArArUrCrGrArArArGrArUrUrCrUrUrArArUrA |
| | | rArGrGrCrArUrCrCrUrUrCrCrGrArUrGrCrUrGrArCrUrUrCrU |
| | | rCrArCrCrGrUrCrCrGrUrUrUrUrCrCrArArUrArGrGrArGrCrG |
| | | rGrGrCrGrGrUrArUrGrU*mU*mU*mU |
| 1454 | MG3-6/3-8 | mC*mG*mA*rGrArArArGrCrCrArGrArCrCrUrGrCrGrCrUrGr |
| | mApoa1 BE E8 | GrUrUrGrArGrArArUrCrGrArArArGrArUrUrCrUrUrArArUrA |
| | | rArGrGrCrArUrCrCrUrUrCrCrGrArUrGrCrUrGrArCrUrUrCrU |
| | | rCrArCrCrGrUrCrCrGrUrUrUrUrCrCrArArUrArGrGrArGrCrG |
| | | rGrGrCrGrGrUrArUrGrU*mU*mU*mU |
| 1455 | MG3-6/3-8 | CTGGTGTGGTACTCGTTCAAGG |
| | mApoa1 BE F12 | |
| 1456 | MG3-6/3-8 | ACTATGGCGCAGGTCCTCCAGC |
| | mApoa1 BE D11 | |
| 1457 | MG3-6/3-8 | TTGGGTGAGACAGGAGATGAAC |
| | mApoa1 BE C5 | |
| 1458 | MG3-6/3-8 | TCTCCTGGAAAACTGGGACACT |
| | mApoa1 BE A4 | |
| 1459 | MG3-6/3-8 | AGGAACGGCTGGGCCCATTGAC |
| | mApoa1 BE F4 | |
| 1460 | MG3-6/3-8 | CTGGGATAACCTGGAGAAAGAA |
| | mApoa1 BE A5 | |
| 1461 | MG3-6/3-8 | CCTGGTGTGGTACTCGTTCAAG |
| | mApoa1 BE E12 | |
| 1462 | MG3-6/3-8 | AGCATGGGCATCAGACTATGGC |
| | mApoa1 BE A11 | |
| 1463 | MG3-6/3-8 | CTCCTGGAAAACTGGGACACTC |
| | mApoa1 BE B4 | |
| 1464 | MG3-6/3-8 | GGAACGGCTGGGCCCATTGACT |
| | mApoa1 BE G4 | |
| 1465 | MG3-6/3-8 | GCCACAGGGGACAGTCTCCCTT |
| | mApoa1 BE B2 | |
| 1466 | MG3-6/3-8 | CAGCGAACAGATGCGCGAGAGC |
| | mApoa1 BE D7 | |
| 1467 | MG3-6/3-8 | ATTGGGTGAGACAGGAGATGAA |
| | mApoa1 BE B5 | |
| 1468 | MG3-6/3-8 | AGGGAGACTGTCCCCTGTGGCT |
| | mApoa1 BE G6 | |
| 1469 | MG3-6/3-8 | CCTACCTTGAACGAGTACCACA |
| | mApoa1 BE A8 | |
| 1470 | MG3-6/3-8 | GGCCCAAGGAGGAGGATTCAAA |
| | mApoa1 BE F2 | |
| 1471 | MG3-6/3-8 | AGCAAGATGAACCCCAGTCCCA |
| | mApoa1 BE E1 | |
| 1472 | MG3-6/3-8 | CTACCTTGAACGAGTACCACAC |
| | mApoa1 BE B8 | |
| 1473 | MG3-6/3-8 | CATGCTGGAGACGCTTAAGACC |
| | mApoa1 BE H8 | |
| 1474 | MG3-6/3-8 | TCGCGACCGCATGCGCACACAC |
| | mApoa1 BE H6 | |
| 1475 | MG3-6/3-8 | ACGAATTCCAGAAGAAATGGAA |
| | mApoa1 BE F5 | |
| 1476 | MG3-6/3-8 | CTAGCCTGAATCTCCTGGAAAA |
| | mApoa1 BE H3 | |
| 1477 | MG3-6/3-8 | TGGGCCCATTGACTCGGGACTT |
| | mApoa1 BE H4 | |
| 1478 | MG3-6/3-8 | CGAGAAAGCCAGACCTGCGCTG |
| | mApoa1 BE E8 | |
| 1479 | MG3-6/3-8 | mA*mC*mU*rArUrUrArArArCrCrArArGrArArArCrUrCrCrCr |
| | mAngpt13 BE | GrUrUrGrArGrArArUrCrGrArArArGrArUrUrCrUrUrArArUrA |
| | C12 | rArGrGrCrArUrCrCrUrUrCrCrGrArUrGrCrUrGrArCrUrUrCrU |
| | | rCrArCrCrGrUrCrCrGrUrUrUrUrCrCrArArUrArGrGrArGrCrG |
| | | rGrGrCrGrGrUrArUrGrU*mU*mU*mU |
| 1480 | MG3-6/3-8 | mC*mG*mA*rArArCrArUrGrGrGrArArArArCrUrArCrGrArA |
| | mAngpt13 BE B2 | rGrUrUrGrArGrArArUrCrGrArArArGrArUrUrCrUrUrArArUr |
| | | ArArGrGrCrArUrCrCrUrUrCrCrGrArUrGrCrUrGrArCrUrUrCr |
| | | UrCrArCrCrGrUrCrCrGrUrUrUrUrCrCrArArUrArGrGrArGrCr |
| | | GrGrGrCrGrGrUrArUrGrU*mU*mU*mU |
| 1481 | MG3-6/3-8 | mA*mG*mU*rArArUrUrGrCrArUrCrCrArGrArGrUrGrGrArU |
| | mAngpt13 BE C1 | rGrUrUrGrArGrArArUrCrGrArArArGrArUrUrCrUrUrArArUr |
| | | ArArGrGrCrArUrCrCrUrUrCrCrGrArUrGrCrUrGrArCrUrUrCr |
| | | UrCrArCrCrGrUrCrCrGrUrUrUrUrCrCrArArUrArGrGrArGrCr |
| | | GrGrGrCrGrGrUrArUrGrU*mU*mU*mU |
| 1482 | MG3-6/3-8 | mA*mA*mG*rArGrArArGrArCrArGrCrCrCrUrUrCrArArCrAr |
| | mAngpt13 BE F3 | GrUrUrGrArGrArArUrCrGrArArArGrArUrUrCrUrUrArArUrA |
| | | rArGrGrCrArUrCrCrUrUrCrCrGrArUrGrCrUrGrArCrUrUrCrU |
| | | rCrArCrCrGrUrCrCrGrUrUrUrUrCrCrArArUrArGrGrArGrCrG |
| | | rGrGrCrGrGrUrArUrGrU*mU*mU*mU |
| 1483 | MG3-6/3-8 | mU*mU*mU*rArGrCrGrArArUrGrGrCrCrUrCrCrUrGrCrArGr |
| | mAngptl3 BE G1 | GrUrUrGrArGrArArUrCrGrArArArGrArUrUrCrUrUrArArUrA |
| | | rArGrGrCrArUrCrCrUrUrCrCrGrArUrGrCrUrGrArCrUrUrCrU |
| | | rCrArCrCrGrUrCrCrGrUrUrUrUrCrCrArArUrArGrGrArGrCrG |
| | | rGrGrCrGrGrUrArUrGrU*mU*mU*mU |
| 1484 | MG3-6/3-8 | ACTATTAAACCAAGAAACTCCC |
| | mAngpt13 BE | |
| | C12 | |
| 1485 | MG3-6/3-8 | CGAAACATGGGAAAACTACGAA |
| | mAngpt13 BE B2 | |
| 1486 | MG3-6/3-8 | AGTAATTGCATCCAGAGTGGAT |
| | mAngpt13 BE C1 | |
| 1487 | MG3-6/3-8 | AAGAGAAGACAGCCCTTCAACA |
| | mAngpt13 BE F3 | |
| 1488 | MG3-6/3-8 | TTTAGCGAATGGCCTCCTGCAG |
| | mAngpt13 BE G1 | |
| 1489 | MG3-6/3-8 | mA*mC*mC*rArGrUrUrArArArArGrArUrCrCrUrCrGrGrUrCr |
| | mTrac BE El | GrUrUrGrArGrArArUrCrGrArArArGrArUrUrCrUrUrArArUrA |
| | | rArGrGrCrArUrCrCrUrUrCrCrGrArUrGrCrUrGrArCrUrUrCrU |
| | | rCrArCrCrGrUrCrCrGrUrUrUrUrCrCrArArUrArGrGrArGrCrG |
| | | rGrGrCrGrGrUrArUrGrU*mU*mU*mU |
| 1490 | MG3-6/3-8 | mU*mU*mC*rArCrArArUrCrCrCrArCrCrUrGrGrArUrCrUrCr |
| | mTrac BE D10 | GrUrUrGrArGrArArUrCrGrArArArGrArUrUrCrUrUrArArUrA |
| | | rArGrGrCrArUrCrCrUrUrCrCrGrArUrGrCrUrGrArCrUrUrCrU |
| | | rCrArCrCrGrUrCrCrGrUrUrUrUrCrCrArArUrArGrGrArGrCrG |
| | | rGrGrCrGrGrUrArUrGrU*mU*mU*mU |
| 1491 | MG3-6/3-8 | ACCAGTTAAAAGATCCTCGGTC |
| | mTrac BE E1 | |
| 1492 | MG3-6/3-8 | TTCACAATCCCACCTGGATCTC |
| | mTrac BE D10 | |

r = native ribose base, m = 2′-O methyl modified base, F = 2′-fluoro modified base, * = phosphorothioate bond

[0503] While the pattern of base conversion varied across spacers, detectable conversion was observed across an editing of A4 to A15. To assess background at these genomic regions, NGS primer pairs used for the experimental samples were used in mock nucleofected samples and showed low to undetectable background conversion (0-0.12%) (FIG. 54). In summary, engineered dimeric 3-68 ABE exhibits high editing activity in mammalian cells at three independent loci and across a large panel of guides.

### Example 41—mRNA Cytidine Base Editors

[0504] To test the activity of the engineered cytidine deaminases at scale, 527 chemically-synthesized guides suitable for use with MG3-6/3-8 to target four therapeutically relevant loci in the mouse genome were designed and purchased from IDT. These guides were co-transfected with in vitro synthesized mRNA in Hepa1-6 (a mouse immortalized mouse hepatocyte cell line) via nucleofection, and C to T conversion was assayed three days post-nucleofection. Prior to harvesting, individual wells were visually assessed for cell viability based on cell growth and presence of floating cells in media. The 3-68 152-6 CBE did not show appreciable cytotoxicity compared to mock samples.

### Cell Culture, Transfections, Next Generation Sequencing, and Base Edit Analysis for Screens (Prophetic)

[0505] Hepa1-6 cells are grown and passaged in Dulbecco's Modified Eagle's Medium plus 1×NEAA (gibco) supplemented with 10% (v/v) fetal bovine serum (gibco) and 1% pen-strep at 37° C. with 5% CO₂. 1×10⁴ cells are nucleofected with 500 ng IVT mRNA and 150 pmol chemically synthesized sgRNA (IDT) using a Lonza-4D nucleofector (program EH-100). Cells are grown for 3 days, visually assessed for viability, harvested, and gDNA is extracted with QuickExtract (Lucigen) according to the manufacturer's instructions. Targeted regions for base edits are amplified using Q5 High-Fidelity DNA polymerase (New England Biolabs) with primers appropriate for use with NGS-based DNA sequencing and extracted DNA as the templates. PCR products are purified by HighPrep PCR Clean-up System (MAGBIO) according to the manufacturer's instructions. Amplicons are sequenced on an Illumina MiSeq machine and analyzed with a proprietary Python script to measure gene editing.

### Example 42—Base Editing Preferences for nMG35-1 ABE

[0506] As described in Example 39, E. coli was transformed with a plasmid containing the nMG35-1-ABE, a non-functional chloramphenicol acetyltransferase (CAT Y193) gene, and an sgRNA that either targets the CAT gene (targeting spacer) or not (scrambled spacer). Cell growth is dependent on the ABE base editing the non-functional CAT gene (A at position 17 from the TAM) (FIG. 55A) to its wild-type variant (H193) and restoring activity. Multiple linkers were evaluated for nMG35-1 fusions to the TadA deaminase monomer (Table 14).

TABLE 14
Linkers evaluated for nMG35-1 fusions with a TadA deaminase.

| | | SEQ ID |
|---|---|---|
| Length | Sequence | NO |
| 7 AAs | PAPAPAP | 1654 |
| 14 AAs | KLGGGAPAVGGGPK | 1655 |
| 15 AAs | GGGGSGGGGSGGGGS | 1649 |
| XTEN (17 aa) | SGSETPGTSEASTPESA | 1650 |
| 26 AAs | GGGGSGGGGSEAAAAKGGGGSGGGGS | 1651 |
| 32 AAs | GGGGSGGGGSEAAAAKEAAAAKGGGGSGGGGS | 1652 |
| 44 AAs | KGKGKGMGAGTLSTDKGESLGIKYEEGQSHRPTNPNASR | 1653 |
| | MAQKV | |

### Results

[0507] Base editing was tested in an E. coli positive selection assay targeting the chloramphenicol acetyltransferase (CAT) gene that was expressed from the same plasmid co-expressing the MG35-1 ABE containing various linkers. The nMG35-1 ABE construct with the 17 amino acid linker (XTEN) outperformed other linkers in base editing experiments (FIG. 55B-55E). In addition, when analyzing the adenine positions across the targeting spacer that were edited by the nMG35-1 ABE, the A at the 9th position (in the middle of the spacer region) showed the highest editing levels in E. coli (FIG. 55D).

### Example 43—the nMG35-1 ABE Edits Additional Target Sites in E. coli

E. coli Positive Selection

[0508] As described in Example 39, a single plasmid construct encompassing a nickase MG35-1 (D59A mutation), a C-terminally fused TadA*-(7.10) monomer, and a C-terminus SV40 NLS (SEQ ID NO: 369) was tested as a base editor with its compatible sgRNA containing a 20 bp spacer sequence targeting the chloramphenicol acetyltransferase (CAT) gene. A non-targeting sgRNA lacking a spacer sequence was used as negative control. The CAT gene contained either an engineered stop codon (at amino acid positions 98 or 122) or a H193Y mutation that renders the CAT gene nonfunctional (FIGS. 56A and 56B). The ABE construct, sgRNA, and non-functional CAT gene were cloned into a pET-21 backbone containing Ampicillin resistance. Ten ng of the plasmid was transformed into 25 μL of BL21(DE3) (Lucigen) E. coli cells and incubated at 37° C. in 450 μL of recovery media for 90 minutes. Next, 70 μL of recovery media containing transformed cells was plated onto plates containing chloramphenicol concentrations of 0, 2, 3, 4, and 8 μg/mL. The 0 μg/mL plate was used as a transformation control. Plates also contained 100 μg/mL Carbecillin and 0.1 mM IPTG. Plates were left at 37° C. for 40 hours. CAT mutations were verified in the resulting colonies by Sanger sequencing (Elim Biopharmaceuticals, Inc).

### Results

[0509] The A to G editing of the nMG35-1 ABE was tested in a positive selection single-plasmid E. coli system in which the ABE is required to revert a chloramphenicol acetyltransferase (CAT) gene stop codon mutation back to glutamine or a tyrosine mutation back to histidine (FIGS. 56A and 56B) in order for E. coli to survive growth under chloramphenicol selection. Four distinct non-functional CAT genes were tested for reversion by the nMG35-1 ABE: three single mutations (a stop codon at residue 98 reversion to Q; a stop codon at residue 122 reversion to Q; and Y at residue 193 reversion to H) and a double mutation in which a CAT gene contains two stop codons at both residues 98 and 122 (both need to be reverted to Q simultaneously to restore CAT gene functionality). These four conditions were tested alongside paired negative controls in which the non-functional CAT genes were co-expressed with sgRNAs missing a spacer sequence. The nMG35-1 ABE successfully edited the four conditions, including the double mutant reversion, as shown by an enrichment of E. coli colonies when grown on plates containing 2 and 4 μg/mL of chloramphenicol (FIG. 56C, “targeting” row). Few colonies also grew on the plate containing 8 μg/mL of chloramphenicol for reversion of the individual stop codon mutations at residues 98 and 122 (FIG. 56C, “targeting” row). Sanger sequencing of the colonies growing on the 2 μg/mL plate from the CAT double mutant reversion determined that 17 of 18 colonies showed the expected A to G edit at both target sites (FIG. 56D). No colonies were seen on the 2, 4, and 8 μg/mL plates plated with E. coli transformed with the non-targeting guide (FIG. 56C, “no spacer” row), confirming that the nMG35-1-ABE is a successful base editor in E. coli.

[0510] When the predicted 3D structure of MG35-1 is aligned to the cryoEM structure of an IscB nuclease (PDB: 7UTN), the PLMP domain of IscB aligns with amino acid (AAs) positions 1-53 of MG35-1. A nickase nMG35-1 ABE with a deletion of AAs 1-53 was tested in the bacterial positive selection assay in which the ABE needs to revert a Y193 mutation to H within the CAT gene to restore CAT functionality (FIG. 57). When these AAs were truncated from the nMG35-1 ABE, E. coli was unable to survive chloramphenicol selection at the minimum inhibitory chloramphenicol concentration of 2 μg/mL. These results suggest that AAs 1-53 of MG35-1 drive efficient base editing of the MG35-1 ABE in E. coli cells.

### Example 44—Base Editing in Human Cells with nMG35-1-ABE (Prophetic)

[0511] In order to demonstrate that an nMG35-1-ABE system is capable of base editing in human cells, a nickase MG35-1 (D59A mutation), a C-terminally fused TadA(8.8m) deaminase monomer, and a C-terminus SV40 NLS fusion system is constructed. HEK293T cells are grown and passaged in Dulbecco's Modified Eagle's Medium plus GlutaMAX (gibco) supplemented with 10% (v/v) fetal bovine serum (gibco) at 37° C. with 5% CO₂. About 2.5×10⁴ cells are seeded on 96-well cell culture plates treated for cell attachment (Costar), and grown for 20 to 24 h (spent media are refreshed with new media before transfection). Each plate well receives 300 ng expression plasmid and 1 μL lipofectamine 2000 (ThermoFisher Scientific) for transfection according to the manufacturer's instructions. Transfected cells are grown for three days, harvested, and genomic DNA is extracted with QuickExtract (Lucigen) according to the manufacturer's instructions. Targeted regions for base edits are amplified using Q5 High-Fidelity DNA polymerase (New England Biolabs) with target-specific primers and PCR products purified with the HighPrep PCR Clean-up System (MAGBIO) according to the manufacturer's instructions. To analyze nMG35-1-ABE base editing in human cells, adapters used for next generation sequencing (NGS) are appended to PCR products by subsequent PCR reactions using the KAPA HiFi HotStart ReadyMix PCR Kit (Roche) and primers compatible with TruSeq DNA Library Prep Kits (Illumina). DNA concentrations of the resulting products are quantified by TapeStation (Agilent), and samples are pooled to prepare the library for NGS analysis. The resulting library is quantified by qPCR with the Aria Real-time PCR System (Agilent), and high throughput sequencing is performed with an Illumina Miseq instrument per manufacturer's instructions.

[0512] While preferred embodiments of the present invention have been shown and described herein, it will be obvious to those skilled in the art that such embodiments are provided by way of example only. It is not intended that the invention be limited by the specific examples provided within the specification. While the invention has been described with reference to the aforementioned specification, the descriptions and illustrations of the embodiments herein are not meant to be construed in a limiting sense. Numerous variations, changes, and substitutions will now occur to those skilled in the art without departing from the invention. Furthermore, it shall be understood that all aspects of the invention are not limited to the specific depictions, configurations or relative proportions set forth herein which depend upon a variety of conditions and variables. It should be understood that various alternatives to the embodiments of the invention described herein may be employed in practicing the invention. It is therefore contemplated that the invention shall also cover any such alternatives, modifications, variations or equivalents. It is intended that the following claims define the scope of the invention and that methods and structures within the scope of these claims and their equivalents be covered thereby.

TABLE 15
Listing of PAM sequences referred to herein

| Sequence Number | Sequence |
|---|---|
| A360 | nRRR |
| A361 | nnRRAY |
| A362 | nnRGGnT |
| A363 | nnRnYAY |
| A364 | — |
| A365 | nRCCV |
| A366 | nRnnGRKA |
| A367 | nnnnC |
| A368 | nRWART |
| A598 | NGG |
| A1106 | AnGg |
| A1107 | nARAA |
| A1108 | ATGaaa |
| A1109 | ATGA |
| A1110 | WTGG |
| A1111 | RTGA |

### Embodiments

[0513] The following embodiments are not intended to be limiting in any way.

[0514] Embodiment 1. An engineered nucleic acid editing system, comprising:
[0515] (a) an endonuclease comprising a RuvC domain and an HNH domain, wherein said endonuclease is derived from an uncultivated microorganism, wherein said endonuclease is a class 2, type II endonuclease, wherein said endonuclease is configured to be deficient in nuclease activity;
[0516] (b) a base editor coupled to said endonuclease; and
[0517] (c) an engineered guide ribonucleic acid structure configured to form a complex with said endonuclease comprising:
   [0518] i. a guide ribonucleic acid sequence configured to hybridize to a target deoxyribonucleic acid sequence; and
   [0519] ii. a ribonucleic acid sequence configured to bind to said endonuclease.

[0520] Embodiment 2. The engineered nucleic acid editing system of Embodiment 1, wherein said RuvC domain lacks nuclease activity.

[0521] Embodiment 3. The engineered nucleic acid editing system of Embodiment 1, wherein said endonuclease is configured to cleave one strand of a double-stranded target deoxyribonucleic acid.

[0522] Embodiment 4. The engineered nucleic acid editing system of Embodiment 1 or Embodiment 2, wherein said class 2, type II endonuclease comprises a nickase mutation.

[0523] Embodiment 5. The engineered nucleic acid editing system of any one of Embodiment 1-Embodiment 4, wherein said endonuclease comprises a sequence with at least 95% sequence identity to any one of SEQ ID NOs:70-78 or 597, or a variant thereof.

[0524] Embodiment 6. The engineered nucleic acid editing system of any one of Embodiment 1-Embodiment 5, wherein said class 2, type II endonuclease comprises an aspartate to alanine mutation at residue 9 relative to SEQ ID NO: 70, residue 13 relative to SEQ ID NOs: 71, 72, or 74, residue 12 relative to SEQ ID NO: 73, residue 17 relative to SEQ ID NO: 75, residue 23 relative to SEQ ID NO: 76, or residue 10 relative to SEQ ID NO: 597 when optimally aligned.

[0525] Embodiment 7. The engineered nuclease system of any one of Embodiment 1-Embodiment 5, wherein said endonuclease comprises an aspartate to alanine mutation at residue 9 relative to SEQ ID NO: 70, residue 13 relative to SEQ ID NO: 72, or residue 17 relative to SEQ ID NO: 75 when optimally aligned.

[0526] Embodiment 8. An engineered nucleic acid editing system comprising:
[0527] (a) an endonuclease having at least 95% sequence identity to any one of SEQ ID NOs: 70-78, 596, or 597, Sequence Number: A598, or a variant thereof;
[0528] (b) a base editor coupled to said endonuclease; and
[0529] (c) an engineered guide ribonucleic acid structure configured to form a complex with said endonuclease comprising:
   [0530] i. a guide ribonucleic acid sequence configured to hybridize to a target deoxyribonucleic acid sequence; and
   [0531] ii. a ribonucleic acid sequence configured to bind to said endonuclease.

[0532] Embodiment 9. An engineered nucleic acid editing system comprising:
[0533] (a) an endonuclease configured to bind to a protospacer adjacent motif (PAM) sequence comprising any one of Sequence Numbers: A360-A368 or A598, or a variant thereof,
[0534] wherein said endonuclease is a class 2, type II endonuclease, and
[0535] wherein said endonuclease is configured to be deficient in nuclease activity;
[0536] (b) a base editor coupled to said endonuclease; and
[0537] (c) an engineered guide ribonucleic acid structure configured to form a complex with said endonuclease comprising:
   [0538] i. a guide ribonucleic acid sequence configured to hybridize to a target deoxyribonucleic acid sequence; and
   [0539] ii. a ribonucleic acid sequence configured to bind to said endonuclease.

[0540] Embodiment 10. The engineered nucleic acid editing system of Embodiment 9, wherein said endonuclease comprises a nickase mutation.

[0541] Embodiment 11. The engineered nucleic acid editing system of Embodiment 9, wherein said endonuclease is configured to cleave one strand of a double-stranded target deoxyribonucleic acid.

[0542] Embodiment 12. The engineered nucleic acid editing system of Embodiment 9, wherein said class 2, type II endonuclease comprises an aspartate to alanine mutation at residue 9 relative to SEQ ID NO: 70, residue 13 relative to SEQ ID NOs: 71, 72, or 74, residue 12 relative to SEQ ID NO: 73, residue 17 relative to SEQ ID NO: 75, residue 23 relative to SEQ ID NO: 76, or residue 10 relative to SEQ ID NO: 597 when optimally aligned.

[0543] Embodiment 13. The engineered nucleic acid editing system of Embodiment 9, wherein said base editor comprises a sequence having at least 70%, 80%, 90% or 95% identity to any one of SEQ ID NOs: 1-51, 57-66, 385-443, 444-475, 594-595, or 599-675, or a variant thereof.

[0544] Embodiment 14. The engineered nucleic acid editing system of Embodiment 9, wherein said base editor comprises a sequence having at least 70%, 80%, 90% or 95% identity to any one of SEQ ID NOs: 50-51 or 385-390.

[0545] Embodiment 15. The engineered nucleic acid editing system of any one of Embodiment 8-Embodiment 14, wherein said endonuclease comprises a RuvC domain lacking nuclease activity.

[0546] Embodiment 16. The engineered nucleic acid editing system of any one of Embodiment 8-Embodiment 15, wherein said endonuclease is derived from an uncultivated microorganism.

[0547] Embodiment 17. The engineered nucleic acid editing system of any one of Embodiment 8-Embodiment 16, wherein said endonuclease has less than 80% identity to a Cas9 endonuclease.

[0548] Embodiment 18. The engineered nucleic acid editing system of any one of Embodiment 8-Embodiment 17, wherein said endonuclease further comprises an HNH domain.

[0549] Embodiment 19. The engineered nucleic acid editing system of any one of Embodiment 1-Embodiment 18, wherein said engineered guide ribonucleic acid sequence comprises a sequence with at least 80% sequence identity to non-degenerate nucleotides of any one of SEQ ID NOs: 88-96, 488-489, or 679-680, or a variant thereof.

[0550] Embodiment 20. An engineered nucleic acid editing system comprising,
[0551] (a) an engineered guide ribonucleic acid structure comprising:
   [0552] (i) a guide ribonucleic acid sequence configured to hybridize to a target deoxyribonucleic acid sequence; and
   [0553] (ii) a ribonucleic acid sequence configured to bind to an endonuclease,
      [0554] wherein said engineered ribonucleic acid sequence comprises a sequence with at least 80% sequence identity to non-degenerate nucleotides of any one of SEQ ID NOs: 88-96, 488-489, or 679-680, or a variant thereof; and
[0555] (b) a class 2, type II endonuclease configured to bind to said engineered guide ribonucleic acid; and
[0556] (c) a base editor coupled to said endonuclease.

[0557] Embodiment 21. The engineered nucleic acid editing system of Embodiment 20, wherein said endonuclease is configured to bind to a protospacer adjacent motif (PAM) sequence selected from the group consisting of Sequence Numbers: A360-A368 or A598.

[0558] Embodiment 22. The engineered nucleic acid editing system of any one of Embodiment 1-Embodiment 21, wherein said base editor comprises a sequence with at least 70%, 80%, 90% or 95% identity to any one of SEQ ID NOs: 1-51, 57-66, 385-443, 444-475, 594-595, or 599-675, or a variant thereof.

[0559] Embodiment 23. The engineered nucleic acid editing system of any one of Embodiment 1-Embodiment 22, wherein said base editor comprises a sequence having at least 70%, 80%, 90% or 95% identity to any one of SEQ ID NOs: 50-51 or 385-390.

[0560] Embodiment 24. The engineered nucleic acid editing system of any of embodiments Embodiment 1-Embodiment 22, wherein said base editor is an adenine deaminase.

[0561] Embodiment 25. The engineered nucleic acid editing system of Embodiment 23, wherein said adenosine deaminase comprises a sequence with at least 70%, 80%, 90% or 95% identity to any one of SEQ ID NOs: 50-51, 57, 385-443, 448-475, or 595, or a variant thereof.

[0562] Embodiment 26. The engineered nucleic acid editing system of any of Embodiment 1-Embodiment 22, wherein said base editor is a cytosine deaminase.

[0563] Embodiment 27. The engineered nucleic acid editing system of Embodiment 26, wherein said cytosine deaminase comprises a sequence with at least 70%, 80%, 90% or 95% identity to any one of SEQ ID NOs: 1-49, 444-447, 594, 58-66, or 599-675, or a variant thereof.

[0564] Embodiment 28. The engineered nucleic acid editing system of any one of Embodiment 1-Embodiment 27, comprising a uracil DNA glycosylase inhibitor (UGI) coupled to said endonuclease or said base editor.

[0565] Embodiment 29. The engineered nucleic acid editing system of Embodiment 28, wherein said uracil DNA glycosylase inhibitor (UGI) comprises a sequence with at least 70%, 80%, 90% or 95% identity to any one of SEQ ID NOs: 52-56 or SEQ ID NO: 67.

[0566] Embodiment 30. The engineered nucleic acid editing system of any one of embodiments 1-Embodiment 29, wherein said engineered guide ribonucleic acid structure comprises at least two ribonucleic acid polynucleotides.

[0567] Embodiment 31. The engineered nucleic acid editing system of any one of embodiments 1-Embodiment 29, wherein said engineered guide ribonucleic acid structure comprises one ribonucleic acid polynucleotide comprising said guide ribonucleic acid sequence and said ribonucleic acid sequence configured to bind to an endonuclease.

[0568] Embodiment 32. The engineered nucleic acid editing system of any one of Embodiment 1-Embodiment 31, wherein said guide ribonucleic acid sequence is complementary to a prokaryotic, bacterial, archaeal, eukaryotic, fungal, plant, mammalian, or human genomic sequence.

[0569] Embodiment 33. The engineered nucleic acid editing system of any one of Embodiment 1-Embodiment 32, wherein said guide ribonucleic acid sequence is 15-24 nucleotides in length.

[0570] Embodiment 34. The engineered nucleic acid editing system of any one of embodiments 1-Embodiment 33, further comprising one or more nuclear localization sequences (NLSs) proximal to an N- or C-terminus of said endonuclease.

[0571] Embodiment 35. The engineered nucleic acid editing system of Embodiment 34, wherein said NLS comprises a sequence with at least 90% identity to a selected from SEQ ID NOs: 369-384, or a variant thereof.

[0572] Embodiment 36. The engineered nucleic acid editing system of any one of Embodiment 1-Embodiment 35, wherein said endonuclease is covalently coupled directly to said base editor or covalently coupled to said base editor through a linker.

[0573] Embodiment 37. The engineered nucleic acid editing system of Embodiment 36, wherein a polypeptide comprises said endonuclease and said base editor.

[0574] Embodiment 38. The engineered nucleic acid editing system of any one of Embodiment 1-Embodiment 37, wherein said endonuclease is configured to cleave one strand of a double-stranded target deoxyribonucleic acid.

[0575] Embodiment 39. The engineered nucleic acid editing system of any one of Embodiment 1-Embodiment 38, wherein said system further comprises a source of Mg²⁺.

[0576] Embodiment 40. The engineered nucleic acid editing system of any one of embodiments 1-Embodiment 39, wherein:
[0577] a) said endonuclease comprises a sequence at least 70%, at least 80%, or at least 90% identical to any one of SEQ ID NOs: 70, 71, 73, 74, 76, 78, 77, or 78, or a variant thereof;
[0578] b) said guide RNA structure comprises a sequence at least 70%, at least 80%, or at least 90% identical to non-degenerate nucleotides of any one of SEQ ID NOs: 88, 89, 91, 92, 94, 96, 95, or 488;
[0579] c) said endonuclease is configured to bind to a PAM comprising any one of Sequence Numbers: A360, A361, A363, A365, A367, or A368; or
[0580] d) said base editor comprises a sequence at least 70%, at least 80%, or at least 90% identical to SEQ ID NOs: 58 or 595, or a variant thereof.

[0581] Embodiment 41. The engineered nucleic acid editing system of any one of embodiments 1-Embodiment 39, wherein:
[0582] a) said endonuclease comprises a sequence at least 70%, at least 80%, or at least 90% identical to any one of SEQ ID NOs: 70, 71, or 78, or a variant thereof;
[0583] b) said guide RNA structure comprises a sequence at least 70%, at least 80%, or at least 90% identical to non-degenerate nucleotides of at least one of SEQ ID NOs: 88, 89, or 96;
[0584] c) said endonuclease is configured to bind to a PAM comprising any one of Sequence Numbers: A360, A362, or A368; or
[0585] d) said base editor comprises a sequence at least 70%, at least 80%, or at least 90% identical to SEQ ID NO: 594, or a variant thereof.

[0586] Embodiment 42. The engineered nucleic acid editing system of any one of embodiments 1-Embodiment 41, wherein said sequence identity is determined by a BLASTP, CLUSTALW, MUSCLE, MAFFT, or Smith-Waterman homology search algorithm.

[0587] Embodiment 43. The engineered nucleic acid editing system of Embodiment 42, wherein said sequence identity is determined by said BLASTP homology search algorithm using parameters of a wordlength (W) of 3, an expectation (E) of 10, and a BLOSUM62 scoring matrix setting gap costs at existence of 11, extension of 1, and using a conditional compositional score matrix adjustment.

[0588] Embodiment 44. The engineered nucleic acid editing system of any one of Embodiment 1-Embodiment 43, wherein said endonuclease is configured to be catalytically dead.

[0589] Embodiment 45. A nucleic acid comprising an engineered nucleic acid sequence optimized for expression in an organism, wherein said nucleic acid encodes a class 2, type II endonuclease coupled to a base editor, and wherein said endonuclease is derived from an uncultivated microorganism.

[0590] Embodiment 46. A nucleic acid comprising an engineered nucleic acid sequence optimized for expression in an organism, wherein said nucleic acid encodes an endonuclease having at least 70% sequence identity to any one of SEQ ID NOs: 70-78 coupled to a base editor.

[0591] Embodiment 47. The nucleic acid of any one of Embodiment 44-Embodiment 46, wherein said endonuclease comprises a sequence encoding one or more nuclear localization sequences (NLSs) proximal to an N- or C-terminus of said endonuclease.

[0592] Embodiment 48. The nucleic acid of Embodiment 47, wherein said NLS comprises a sequence with at least 90% identity to a selected from SEQ ID NOs: 369-384, or a variant thereof.

[0593] Embodiment 49. The nucleic acid of any one of Embodiment 44-Embodiment 48, wherein said organism is prokaryotic, bacterial, eukaryotic, fungal, plant, mammalian, rodent, or human.

[0594] Embodiment 50. A vector comprising a nucleic acid sequence encoding a class 2, type II endonuclease coupled to a base editor, wherein said endonuclease is derived from an uncultivated microorganism.

[0595] Embodiment 51. A vector comprising the nucleic acid of any of embodiments Embodiment 44-Embodiment 49.

[0596] Embodiment 52. The vector of any of Embodiment 50-Embodiment 51, further comprising a nucleic acid encoding an engineered guide ribonucleic acid structure configured to form a complex with said endonuclease comprising:
[0597] a) a guide ribonucleic acid sequence configured to hybridize to a target deoxyribonucleic acid sequence; and
[0598] b) a ribonucleic acid sequence configured to binding to said endonuclease.

[0599] Embodiment 53. The vector of any of Embodiment 50-Embodiment 52, wherein the vector is a plasmid, a minicircle, a CELiD, an adeno-associated virus (AAV) derived virion, or a lentivirus.

[0600] Embodiment 54. A cell comprising the vector of any of Embodiment 50-Embodiment 53.

[0601] Embodiment 55. A method of manufacturing an endonuclease, comprising cultivating said cell of Embodiment 54.

[0602] Embodiment 56. A method for modifying a double-stranded deoxyribonucleic acid polynucleotide comprising contacting said double-stranded deoxyribonucleic acid polynucleotide with a complex comprising:
[0603] a) an endonuclease comprising a RuvC domain and an HNH domain, wherein said endonuclease is derived from an uncultivated microorganism, wherein said endonuclease is a class 2, type II endonuclease, and wherein said RuvC domain lacks nuclease activity;
[0604] b) a base editor coupled to said endonuclease; and
[0605] c) an engineered guide ribonucleic acid structure configured to bind to said endonuclease and said double-stranded deoxyribonucleic acid polynucleotide;
   wherein said double-stranded deoxyribonucleic acid polynucleotide comprises a protospacer adjacent motif (PAM).

[0606] Embodiment 57. The method of Embodiment 56, wherein said endonuclease comprising a RuvC domain and an HNH domain is covalently coupled directly to said base editor or covalently coupled to said base editor through a linker.

[0607] Embodiment 58. The method of Embodiment 56 or Embodiment 57, wherein said endonuclease comprising a RuvC domain and an HNH domain comprises a sequence with at least 95% sequence identity to any one of SEQ ID NOs:70-78 or 597, or a variant thereof.

[0608] Embodiment 59. The method of any one of Embodiment 56-Embodiment 57, wherein said endonuclease comprises an aspartate to alanine mutation at residue 9 relative to SEQ ID NO: 70, residue 13 relative to SEQ ID NOs: 71, 72, or 74, residue 12 relative to SEQ ID NO: 73 or 78, residue 17 relative to SEQ ID NO: 75, residue 23 relative to SEQ ID NO: 76, residue 8 relative to SEQ ID NO: 77, or residue 10 relative to SEQ ID NO: 597 when optimally aligned.

[0609] Embodiment 60. The method of any one of Embodiment 56-Embodiment 57, wherein said endonuclease comprises an aspartate to alanine mutation at residue 9 relative to SEQ ID NO: 70, residue 13 relative to SEQ ID NO: 72, or residue 17 relative to SEQ ID NO: 75 when optimally aligned.

[0610] Embodiment 61. A method for modifying a double-stranded deoxyribonucleic acid polynucleotide, comprising contacting said double-stranded deoxyribonucleic acid polynucleotide with a complex comprising:
[0611] a class 2, type II endonuclease,
[0612] a base editor coupled to said endonuclease, and
[0613] an engineered guide ribonucleic acid structure configured to bind to said endonuclease
[0614] and said double-stranded deoxyribonucleic acid polynucleotide;
   wherein said double-stranded deoxyribonucleic acid polynucleotide comprises a protospacer adjacent motif (PAM); and
   wherein said PAM comprises a sequence selected from the group consisting of SEQ ID NOs:70-78 or 597.

[0615] Embodiment 62. The method of Embodiment 61, wherein said class 2, type II endonuclease is covalently coupled to said base editor or coupled to said base editor through a linker.

[0616] Embodiment 63. The method of Embodiment 61 or Embodiment 62, wherein said base editor comprises a sequence with at least 70%, at least 80%, at least 90% or at least 95% identity to a sequence selected from SEQ ID NOs: 1-51, 57-66, 385-443, 444-475, 594-595, or 599-675, or a variant thereof.

[0617] Embodiment 64. The method of any one of Embodiment 61-Embodiment 63, wherein
[0618] said base editor comprises an adenine deaminase;
[0619] said double-stranded deoxyribonucleic acid polynucleotide comprises an adenine; and
[0620] modifying said double-stranded deoxyribonucleic acid polypeptide comprises converting said adenine to guanine.

[0621] Embodiment 65. The method of Embodiment 64, wherein said adenine deaminase comprises a sequence with at least 70%, 80%, 90% or 95% sequence identity to any one of SEQ ID NOs: 50-51, 57, 385-443, 448-475, or 595, or a variant thereof.

[0622] Embodiment 66. The method of any one of Embodiment 61-Embodiment 63, wherein
[0623] said base editor comprises a cytosine deaminase;
[0624] said double-stranded deoxyribonucleic acid polynucleotide comprises a cytosine; and
[0625] modifying said double-stranded deoxyribonucleic acid polypeptide comprises converting said cytosine to uracil.

[0626] Embodiment 67. The method of Embodiment 66, wherein said cytosine deaminase comprises a sequence with at least 70%, 80%, 90% or 95% sequence identity to any one of SEQ ID NOs: 1-49, 444-447, 594, 58-66, or 599-675, or a variant thereof.

[0627] Embodiment 68. The method of any one of Embodiment 61-Embodiment 67, wherein said complex further comprises a uracil DNA glycosylase inhibitor coupled to said endonuclease or said base editor.

[0628] Embodiment 69. The method of Embodiment 68, wherein said uracil DNA glycosylase inhibitor comprises a sequence with at least 70%, 80%, 90% or 95% identity to any one of SEQ ID NOs: 52-56 or SEQ ID NO: 67, or a variant thereof.

[0629] Embodiment 70. The method of any one of Embodiment 61-Embodiment 69, wherein said double-stranded deoxyribonucleic acid polynucleotide comprises a first strand comprising a sequence complementary to a sequence of said engineered guide ribonucleic acid structure and a second strand comprising said PAM.

[0630] Embodiment 71. The method of Embodiment 70, wherein said PAM is directly adjacent to the 3′ end of said sequence complementary to said sequence of said engineered guide ribonucleic acid structure.

[0631] Embodiment 72. The method of any one of Embodiment 61-Embodiment 71, wherein said class 2, type II endonuclease is not a Cas9 endonuclease, a Cas14 endonuclease, a Cas12a endonuclease, a Cas12b endonuclease, a Cas 12c endonuclease, a Cas12d endonuclease, a Cas12e endonuclease, a Cas13a endonuclease, a Cas13b endonuclease, a Cas13c endonuclease, or a Cas 13d endonuclease.

[0632] Embodiment 73. The method of any one of Embodiment 61-Embodiment 72, wherein said class 2, type II endonuclease is derived from an uncultivated microorganism.

[0633] Embodiment 74. The method of any one of Embodiment 61-Embodiment 73, wherein said double-stranded deoxyribonucleic acid polynucleotide is a eukaryotic, plant, fungal, mammalian, rodent, or human double-stranded deoxyribonucleic acid polynucleotide.

[0634] Embodiment 75. A method of modifying a target nucleic acid locus, said method comprising delivering to said target nucleic acid locus said engineered nucleic acid editing system of any one of embodiments 1-Embodiment 44, wherein said endonuclease is configured to form a complex with said engineered guide ribonucleic acid structure, and wherein said complex is configured such that upon binding of said complex to said target nucleic acid locus, said complex modifies a nucleotide of said target nucleic locus.

[0635] Embodiment 76. The method of Embodiment 75, wherein said engineered nucleic acid editing system comprises an adenine deaminase, said nucleotide is an adenine, and modifying said target nucleic acid locus comprises converting said adenine to a guanine.

[0636] Embodiment 77. The method of Embodiment 75, wherein said engineered nucleic acid editing system comprises a cytidine deaminase and a uracil DNA glycosylase inhibitor, said nucleotide is a cytosine and modifying said target nucleic acid locus comprises converting said adenine to a uracil.

[0637] Embodiment 78. The method of any one of Embodiment 75-Embodiment 77, wherein said target nucleic acid locus comprises genomic DNA, viral DNA, or bacterial DNA.

[0638] Embodiment 79. The method of any one of Embodiment 75-Embodiment 78, wherein said target nucleic acid locus is in vitro.

[0639] Embodiment 80. The method of any one of Embodiment 75-Embodiment 78, wherein said target nucleic acid locus is within a cell.

[0640] Embodiment 81. The method of Embodiment 80, wherein said cell is a prokaryotic cell, a bacterial cell, a eukaryotic cell, a fungal cell, a plant cell, an animal cell, a mammalian cell, a rodent cell, a primate cell, or a human cell.

[0641] Embodiment 82. The method of any one of Embodiment 80-Embodiment 81, wherein said cell is within an animal.

[0642] Embodiment 83. The method of Embodiment 82, wherein said cell is within a cochlea.

[0643] Embodiment 84. The method of any one of Embodiment 80-Embodiment 81, wherein said cell is within an embryo.

[0644] Embodiment 85. The method of Embodiment 84, wherein said embryo is a two-cell embryo.

[0645] Embodiment 86. The method of Embodiment 84, wherein said embryo is a mouse embryo.

[0646] Embodiment 87. The method of any one of Embodiment 75-Embodiment 86, wherein delivering said engineered nucleic acid editing system to said target nucleic acid locus comprises delivering the nucleic acid of any of embodiments Embodiment 46-Embodiment 49 or the vector of any of embodiments Embodiment 50-Embodiment 53.

[0647] Embodiment 88. The method of any one of Embodiment 75-Embodiment 87, wherein delivering said engineered nucleic acid editing system to said target nucleic acid locus comprises delivering a nucleic acid comprising an open reading frame encoding said endonuclease.

[0648] Embodiment 89. The method of Embodiment 88, wherein said nucleic acid comprises a promoter to which said open reading frame encoding said endonuclease is operably linked.

[0649] Embodiment 90. The method of any one of Embodiment 75-Embodiment 89, wherein delivering said engineered nucleic acid editing system to said target nucleic acid locus comprises delivering a capped mRNA comprising said open reading frame encoding said endonuclease.

[0650] Embodiment 91. The method of any one of Embodiment 75-Embodiment 86, wherein delivering said engineered nucleic acid editing system to said target nucleic acid locus comprises delivering a polypeptide.

[0651] Embodiment 92. The method of any one of Embodiment 75-Embodiment 86, wherein delivering said engineered nucleic acid editing system to said target nucleic acid locus comprises delivering a deoxyribonucleic acid (DNA) encoding said engineered guide ribonucleic acid structure operably linked to a ribonucleic acid (RNA) pol III promoter.

[0652] Embodiment 93. An engineered nucleic acid editing polypeptide, comprising:
[0653] an endonuclease comprising a RuvC domain and an HNH domain, wherein said endonuclease is derived from an uncultivated microorganism, wherein said endonuclease is a class 2, type II endonuclease, and
[0654] wherein said RuvC domain lacks nuclease activity; and a base editor coupled to said endonuclease.

[0655] Embodiment 94. The engineered nucleic acid editing polypeptide of Embodiment 93, wherein said endonuclease comprises a sequence with at least 95% sequence identity to any one of SEQ ID NOs:70-78 or 597, or a variant thereof.

[0656] Embodiment 95. An engineered nucleic acid editing polypeptide, comprising:
[0657] an endonuclease having at least 95% sequence identity to any one of SEQ ID NOs:70-78 or 597, or a variant thereof,
   [0658] wherein said endonuclease comprises a RuvC domain lacking nuclease activity; and a base editor coupled to said endonuclease.

[0659] Embodiment 96. An engineered nucleic acid editing polypeptide, comprising:
[0660] an endonuclease configured to bind to a protospacer adjacent motif (PAM) sequence comprising any one of Sequence Numbers: A360-A368 or A598,
[0661] wherein said endonuclease is a class 2, type II endonuclease, and
[0662] wherein said endonuclease comprises a RuvC domain lacks nuclease activity; and a base editor coupled to said endonuclease.

[0663] Embodiment 97. The engineered nucleic acid editing polypeptide of Embodiment 95 or Embodiment 96, wherein said endonuclease is derived from an uncultivated microorganism.

[0664] Embodiment 98. The engineered nucleic acid editing polypeptide of any one of Embodiment 93-Embodiment 97, wherein said endonuclease has less than 80% identity to a Cas9 endonuclease.

[0665] Embodiment 99. The engineered nucleic acid editing polypeptide of any one of Embodiment 95-Embodiment 98, wherein said endonuclease further comprises an HNH domain.

[0666] Embodiment 100. The engineered nucleic acid editing polypeptide of any one of Embodiment 95-Embodiment 99, wherein said tracr ribonucleic acid sequence comprises a sequence with at least 80% sequence identity to about 60 to 90 consecutive nucleotides selected from any one of SEQ ID NOs: 88-96, 488, 489, and 679-680.

[0667] Embodiment 101. The engineered nucleic acid editing polypeptide of any one of Embodiment 93-Embodiment 100, wherein said base editor comprises a sequence with at least 70%, 80%, 90% or 95% identity to any one of SEQ ID NOs: 1-51, 57-66, 385-443, 444-475, 594-595, or 599-675, or a variant thereof.

[0668] Embodiment 102. The engineered nucleic acid editing polypeptide of any one of Embodiment 93-Embodiment 101, wherein said base editor is an adenine deaminase.

[0669] Embodiment 103. The engineered nucleic acid editing polypeptide of Embodiment 102, wherein said adenosine deaminase comprises a sequence with at least 70%, 80%, 90% or 95% sequence identity to any one of SEQ ID NOs: 50-51, 57, 385-443, 448-475, or 595, or a variant thereof.

[0670] Embodiment 104. The engineered nucleic acid editing polypeptide of any one of Embodiment 93-Embodiment 101, wherein said base editor is a cytosine deaminase.

[0671] Embodiment 105. The engineered nucleic acid editing polypeptide of Embodiment 104, wherein said cytosine deaminase comprises a sequence with at least 70%, 80%, 90% or 95% sequence identity to any one of SEQ ID NOs: 1-49, 444-447, 594, or 58-66, or a variant thereof.

[0672] Embodiment 106. An engineered nucleic acid editing polypeptide, comprising:
[0673] an endonuclease, wherein said endonuclease is configured to be deficient in endonuclease activity; and
[0674] a base editor coupled to said endonuclease,
[0675] wherein said base editor comprises a sequence with at least 70%, 80%, 90% or 95% sequence identity to any one of SEQ ID NOs: 1-51, 385-386, 387-443, 444-447, 488-475, 595, or 599-675, or a variant thereof.

[0676] Embodiment 107. The engineered nucleic acid editing polypeptide of Embodiment 106, wherein said endonuclease is configured to cleave one strand of a double-stranded target deoxyribonucleic acid.

[0677] Embodiment 108. The engineered nucleic acid editing polypeptide of Embodiment 106, wherein said endonuclease is configured to be catalytically dead.

[0678] Embodiment 109. The engineered nucleic acid editing polypeptide of any one of Embodiment 106-Embodiment 108, wherein said endonuclease is an endonuclease.

[0679] Embodiment 110. The engineered nucleic acid editing polypeptide of Embodiment 109, wherein said endonuclease is a Class II, type II endonuclease or a Class II, type V endonuclease.

[0680] Embodiment 111. The engineered nucleic acid editing polypeptide of Embodiment 106, wherein said endonuclease comprises a sequence having at least 70%, 80%, 90% or 95% sequence identity to any one of SEQ ID NOs:70-78 or 597, or a variant thereof.

[0681] Embodiment 112. The engineered nucleic acid editing polypeptide of any one of Embodiment 109-Embodiment 111, wherein said endonuclease comprises a nickase mutation.

[0682] Embodiment 113. The engineered nucleic acid editing polypeptide of Embodiment 112, wherein said endonuclease comprises the aspartate to alanine mutation at residue 9 relative to SEQ ID NO: 70, residue 13 relative to SEQ ID NOs: 71, 72, or 74, residue 12 relative to SEQ ID NO: 73, residue 17 relative to SEQ ID NO: 75, residue 23 relative to SEQ ID NO: 76, or residue 10 relative to SEQ ID NO: 597.

[0683] Embodiment 114. The engineered nucleic acid editing polypeptide of any one of Embodiment 109-Embodiment 113 wherein said endonuclease is configured to bind to a protospacer adjacent motif (PAM) sequence selected from the group consisting of Sequence Numbers: A360-A368 or A598.

[0684] Embodiment 115. The engineered nucleic acid editing polypeptide of any one of Embodiment 106-Embodiment 114, wherein said base editor is an adenine deaminase.

[0685] Embodiment 116. The engineered nucleic acid editing polypeptide of Embodiment 115, wherein said adenosine deaminase comprises a sequence with at least 80%, at least 81%, at least 82%, at least 83%, at least 84%, at least 85%, at least 86%, at least 87%, at least 88%, at least 89%, at least 90%, at least 91%, at least 92%, at least 93%, at least 94%, at least 95%, at least 96%, at least 97%, at least 98%, at least 99%, or 100% sequence identity to any one of SEQ ID NOs: 50-51, 385-443, 448-475, or 595, or a variant thereof.

[0686] Embodiment 117. The engineered nucleic acid editing polypeptide of Embodiment 116, wherein said adenosine deaminase comprises a sequence with at least 70%, 80%, 90% or 95% identity to any one of SEQ ID NOs: 50-51, 385-390, or 595, or a variant thereof.

[0687] Embodiment 118. The engineered nucleic acid editing polypeptide of any one of Embodiment 106-Embodiment 114, wherein said base editor is a cytosine deaminase.

[0688] Embodiment 119. The engineered nucleic acid editing polypeptide of Embodiment 118, wherein said cytosine deaminase comprises a sequence with at least 70%, 80%, 90% or 95% identity to any one of SEQ ID NOs: 1-49, 444-447, or a variant thereof.

[0689] Embodiment 120. The engineered nucleic acid editing polypeptide of any one of Embodiment 106-Embodiment 119, further comprising a uracil DNA glycosylase inhibitor (UGI) coupled to said endonuclease or said base editor.

[0690] Embodiment 121. The engineered nucleic acid editing polypeptide of Embodiment 120, wherein said uracil DNA glycosylase inhibitor comprises a sequence with at least 70%, 80%, 90% or 95% identity to any one of SEQ ID NOs: 52-56 or SEQ ID NO: 67, or a variant thereof.

[0691] Embodiment 122. The engineered nucleic acid editing polypeptide of any one of Embodiment 106-Embodiment 121, wherein a polypeptide comprising said endonuclease comprises one or more nuclear localization sequences (NLSs) proximal to an N- or C-terminus of said endonuclease.

[0692] Embodiment 123. The engineered nucleic acid editing polypeptide of Embodiment 122, wherein said NLS comprises a sequence with at least 90% identity to a selected from SEQ ID NOs: 369-384, or a variant thereof.

[0693] Embodiment 124. The engineered nucleic acid editing polypeptide of any one of Embodiment 106-Embodiment 123, wherein said endonuclease is covalently coupled directly to said base editor or covalently coupled to said base editor through a linker.

[0694] Embodiment 125. A nucleic acid comprising an engineered nucleic acid sequence optimized for expression in an organism, wherein said nucleic acid encodes a sequence having at least 80%, at least 81%, at least 82%, at least 83%, at least 84%, at least 85%, at least 86%, at least 87%, at least 88%, at least 89%, at least 90%, at least 91%, at least 92%, at least 93%, at least 94%, at least 95%, at least 96%, at least 97%, at least 98%, at least 99%, or 100% sequence identity to any one of SEQ ID NOs: 1-51, 385-386, 387-443, 444-447, 488-475, or 595, or a variant thereof.

[0695] Embodiment 126. The nucleic acid of Embodiment 125, wherein said organism is prokaryotic, bacterial, eukaryotic, fungal, plant, mammalian, rodent, or human.

[0696] Embodiment 127. A vector comprising the nucleic acid of any of Embodiment 125-Embodiment 126.

[0697] Embodiment 128. The vector of Embodiment 127, wherein the vector is a plasmid, a minicircle, a CELiD, an adeno-associated virus (AAV) derived virion, or a lentivirus.

[0698] Embodiment 129. A cell comprising the vector of any one of Embodiment 127-Embodiment 128.

[0699] Embodiment 130. A method of manufacturing a base editor, comprising cultivating said cell of Embodiment 129.

[0700] Embodiment 131. A system comprising:
[0701] (a) the nucleic acid editing polypeptide of any one of Embodiment 106-Embodiment 124; and
[0702] (b) an engineered guide ribonucleic acid structure configured to form a complex with said nucleic acid editing polypeptide comprising:
   [0703] i. a guide ribonucleic acid sequence configured to hybridize to a target deoxyribonucleic acid sequence; and
   [0704] ii. ribonucleic acid sequence configured to bind to said endonuclease.

[0705] Embodiment 132. The system of Embodiment 131, wherein said engineered guide ribonucleic acid sequence comprises a sequence with at least 80% sequence identity to non-degenerate nucleotides of any one of SEQ ID NOs: 88-96, 488-489, or 679-680.

[0706] Embodiment 133. A method of modifying a target nucleic acid locus, said method comprising delivering to said target nucleic acid locus said engineered nucleic acid editing polypeptide of any one of embodiments Embodiment 106-Embodiment 124 or said system of any one of embodiments Embodiment 131-Embodiment 132, wherein said complex is configured such that upon binding of said complex to said target nucleic acid locus, said complex modifies a nucleotide of said target nucleic locus.

[0707] Embodiment 134. A nucleic acid editing polypeptide, comprising:
[0708] an adenosine deaminase, comprising a polypeptide sequence comprising a substitution at at least one residue selected from the group consisting of residue 24, residue 83, residue 85, residue 107, residue 109, residue 112, residue 124, residue 143, residue 147, residue 148, residue 154, or residue 158 relative to SEQ ID NO: 386 when optimally aligned.

[0709] Embodiment 135. The nucleic acid editing polypeptide of Embodiment 134, wherein said residue substituted is selected from W24, V83, L85, A107, D109, T112, H124, A143, S147, D148, R154, and K158.

[0710] Embodiment 136. The nucleic acid editing polypeptide of Embodiment 134 or Embodiment 135, wherein said substitution is a conservative substitution.

[0711] Embodiment 137. The nucleic acid editing polypeptide of Embodiment 134 or Embodiment 135, wherein said substitution is a non-conservative substitution.

[0712] Embodiment 138. The nucleic acid editing polypeptide of any one of Embodiment 134-Embodiment 137, comprising a substitution at W24, wherein said substitution is W24R.

[0713] Embodiment 139. The nucleic acid editing polypeptide of any one of Embodiment 134-Embodiment 138, comprising a substitution at V83, wherein said substitution is V83S.

[0714] Embodiment 140. The nucleic acid editing polypeptide of any one of Embodiment 134-Embodiment 139, comprising a substitution at L85, wherein said substitution is L85F.

[0715] Embodiment 141. The nucleic acid editing polypeptide of any one of Embodiment 134-Embodiment 140, comprising a substitution at A107, wherein said substitution is AT07V.

[0716] Embodiment 142. The nucleic acid editing polypeptide of any one of Embodiment 134-Embodiment 141, comprising a substitution at D109, wherein said substitution is D109N.

[0717] Embodiment 143. The nucleic acid editing polypeptide of any one of Embodiment 134-Embodiment 142, comprising a substitution at T112, wherein said substitution is T112R.

[0718] Embodiment 144. The nucleic acid editing polypeptide of any one of Embodiment 134-Embodiment 143, comprising a substitution at H124, wherein said substitution is H124Y.

[0719] Embodiment 145. The nucleic acid editing polypeptide of any one of Embodiment 134-Embodiment 144, comprising a substitution at A143, wherein said substitution is A143N.

[0720] Embodiment 146. The nucleic acid editing polypeptide of any one of Embodiment 134-Embodiment 145, comprising a substitution at S147, wherein said substitution is S147C.

[0721] Embodiment 147. The nucleic acid editing polypeptide of any one of Embodiment 134-Embodiment 146, comprising a substitution at D148, wherein said substitution is D148Y or D148R.

[0722] Embodiment 148. The nucleic acid editing polypeptide of any one of Embodiment 134-Embodiment 147, comprising a substitution at R154, wherein said substitution is R154P.

[0723] Embodiment 149. The nucleic acid editing polypeptide of any one of Embodiment 134-Embodiment 148, comprising a substitution at K158, wherein said substitution is K158N.

[0724] Embodiment 150. The nucleic acid editing polypeptide of any one of Embodiment 134-Embodiment 149, wherein said adenosine deaminase comprises a sequence having at least 80%, at least 81%, at least 82%, at least 83%, at least 84%, at least 85%, at least 86%, at least 87%, at least 88%, at least 89%, at least 90%, at least 91%, at least 92%, at least 93%, at least 94%, at least 95%, at least 96%, at least 97%, at least 98%, at least 99% sequence identity to any one of SEQ ID NOs: 50-51 or 385-443.

[0725] Embodiment 151. The engineered nucleic acid editing polypeptide of any one of Embodiment 134-Embodiment 150, further comprising an endonuclease, wherein said endonuclease is configured to be deficient in endonuclease activity.

[0726] Embodiment 152. The engineered nucleic acid editing polypeptide of Embodiment 151, wherein said endonuclease is configured to cleave one strand of a double-stranded target deoxyribonucleic acid.

[0727] Embodiment 153. The engineered nucleic acid editing polypeptide of Embodiment 151, wherein said endonuclease is configured to be catalytically dead.

[0728] Embodiment 154. The engineered nucleic acid editing polypeptide of any one of Embodiment 151-Embodiment 153, wherein said endonuclease is a Cas endonuclease.

[0729] Embodiment 155. The engineered nucleic acid editing polypeptide of Embodiment 154, wherein said endonuclease is a Class II, type II endonuclease or a Class II, type V endonuclease.

[0730] Embodiment 156. The engineered nucleic acid editing polypeptide of Embodiment 155, wherein said endonuclease comprises a sequence having at least 70%, 80%, 90% or 95% sequence identity to any one of SEQ ID NOs:70-78 or 597, or a variant thereof.

[0731] Embodiment 157. The engineered nucleic acid editing polypeptide of any one of Embodiment 151-Embodiment 156, wherein said endonuclease comprises a nickase mutation.

[0732] Embodiment 158. The engineered nucleic acid editing polypeptide of Embodiment 157, wherein said endonuclease comprises the aspartate to alanine mutation at residue 9 relative to SEQ ID NO: 70, residue 13 relative to SEQ ID NOs: 71, 72, or 74, residue 12 relative to SEQ ID NO: 73, residue 17 relative to SEQ ID NO: 75, residue 23 relative to SEQ ID NO: 76, or residue 10 relative to SEQ ID NO: 597.

[0733] Embodiment 159. The engineered nucleic acid editing polypeptide of any one of Embodiment 151-Embodiment 156, wherein said endonuclease is configured to bind to a protospacer adjacent motif (PAM) sequence selected from the group consisting of Sequence Numbers: A360-A368 or A598.

The application's sequence listing, which the Patent Office published only in electronic form, follows.

SEQUENCE LISTING (1739 sequences)

SEQ ID NO: 1 - protein, 186 aa, unidentified
MARVLGLDPGFATCGYALVDLTRKDGAPFVDVRSLGTLRTAKADKKRKVLAADDNLRRAQELIRALYPLASNAQAIVAESMSFPRNSAAAAKMAMCWGIVATLAEMNDLPIVQATPKEIKIAVAGVGTATKEDVAAAVCAKCGRQFSEELLAQGLPKGMHEHAYDAVASVLACLNSDVLRAIRRAG

SEQ ID NO: 2 - protein, 164 aa, unidentified
MDRLSLHQYAIALAWVAATRSEDPYTRVGCVALSEQGNVLATAYNGLKPKATFGPEFWNNRESRLPFMVHAEMNLVSLTKRNEVHTVAINILPCPTCAAFLATHGVQQVVYSEVYHRDKGTVGLTVLREYGVEIHHLPYYRVRPVFLDMDEAHRKVRSEQRTAA

SEQ ID NO: 3 - protein, 135 aa, unidentified
MREYIQAARDEAAKSRCDRAHVGCVIVDRATGHVVSSAFNETPHGLEPCDTGGHRIVDNHCVNTVHAERNAIRKMTEHGSEYTLYVTHYPCQGCAHLIASCPEIVEVVYLGDYNNSSEATALLSGLSKGVHHGEE

SEQ ID NO: 4 - protein, 160 aa, unidentified
MSNTQSLHTTFMHILFEFSKLSHCVSKQVAAMAVKDGRIISTGINGTAPGYTNCDDIFNKSDFNRELHHQFSNTYEIHAEMNMILYAAKNGISLDGATLYCSMLPCWNCIKHISVTGIKHIIYAKRYDMLSLEDEKNIYYYCKKLGITIQQFDPDTLGSF

SEQ ID NO: 5 - protein, 124 aa, unidentified
MTSGILKLALEEAESSTYRFRVGAVVFKGSRILASGHNGIRSSRIHPLHKNYNNALHAEQDAILNVKDWSTLKGCSILVVKVSKTKGTISMAKPCPMCQQLLRHVGIKTMYFSNENGEIISEKL

SEQ ID NO: 6 - protein, 132 aa, unidentified
MTKREIAYFNAAKAVSSLSDHKYKMGCVIVNKHRIISSGFNSETKCHRIQAELDMNEYKMHSSGKVHAETSALLSLRHIDLSKASIFIYRELKDGTKALARPCPCCQKLIRKAGIKHVYYTGNNSLIYEEFI

SEQ ID NO: 7 - protein, 142 aa, unidentified
AAGDFVQVREYIKAARDEAAKSRCDRAHVGCVIVDRVTGRVVSRAFNETPHGLEPCDTGGHRMIDGHCVNTVHAERNAIRKMKEHESEYTLYVTHYPCQGCAHLIASCPEIVEVVYLGDYRNSKEATALLMGLSKGVHRGEE

SEQ ID NO: 8 - protein, 82 aa, unidentified
HRIVDNHCVNTVHAERNAIRKMKEHGSEYTLYVTHYPCQGCAHLISSCPEIVEVVYLGDYRNSSEATALLSGLSKGVHRGEE

SEQ ID NO: 9 - protein, 115 aa, unidentified
HVGCVIVDHATGQVVSSAFNETPPGLEPCDTGGHRIVDDHCVNTVHAERGAIRKMAEHGSEYTLYVTHYPCRGCAHLISSCPEIVEVVYLGDYNNSSEATDLLMSLSKGVHRAEE

SEQ ID NO: 10 - protein, 186 aa, unidentified; identical to SEQ ID NO: 1

SEQ ID NO: 11 - protein, 232 aa, unidentified
MDNLPKYEYLNVLDPERTGISETWLSYFMNIARVIATKSKDPSTKVGAVAVDTNTKRILATGYNGFPAGVKERPERWERPVKYSYIVHSEANIVASAARFGINLTGSTLFVTLHPCVDCAKIVASAGFKNVIYIDTEIKAQVGREWITLLQHSKNIFEESRIGLYACREVPAKKKEEPKLYKTYKGTVETTTELNNKRDKQLGDLVFVKSRNTLYEWNGVIWTVIGEYQHLL

SEQ ID NO: 12 - protein, 113 aa, unidentified
MDNLPKYEYLNVLDPERTRISETWLSYFMNIARVIATKSKDPSTKVGAVAVDTNTKRILATGYNGFPAGVKERPERWERPVKYSYIVHSEANIVASAARFGINLTGSTLFVTL

SEQ ID NO: 13 - protein, 232 aa, unidentified
MDNLPKYEYLNVLDPERTRISETWLSYFMNIARVIATKSKDPSTKVGAVAVDTNTKRILATGYNGFPAGVKERPERWERPVKYSYIVHSEANIVASAARFGINLTGSTLFVTLHPCVDCAKIVASAGFKNVIYIDTEIKPQVGREWITLLQHSKNIFEESRIGLYACREVPAKKKEEPKLYKTFKGTVETTVELNNKRDKQLGDLVFVKSRNTLYEWNGVIWTVIGEYQHLL

SEQ ID NO: 14 - protein, 164 aa, unidentified; identical to SEQ ID NO: 2

SEQ ID NO: 15 - protein, 50 aa, unidentified
MKQYIQAARDEAAKSRCDRAHVGCVIVDRATGQVVSRAFNETPHGLEPCD

SEQ ID NO: 16 - protein, 135 aa, unidentified
MKQYIQAARDEAAKSRCDRAHVGCVIVDRATGQVVSRAFNETPHGLEPCDTGGHRIVDNHCVNTVHAERNAIRKMKEHGSEYTLYVTHYPCQGCAHLISSCPEIVEVVYLGDYRNSSEATALLSGLSKGVHRGEE

SEQ ID NO: 17 - protein, 135 aa, unidentified
MKQYIQAARDEAAKSRCDRAHVGCVIVDRATGQVVSRAFNETPHGLEPCDTGGHRIVDNHCVNTVHAERNAIRQMKEHGSEYTLYVTHYPCQGCAHLISSCPEIIEVVYIGDYNNSSEATALLSGLSKGVHRGEE

SEQ ID NO: 18 - protein, 204 aa, unidentified
MNIARVIATKSKDPSTKVGAVAVDTNTKRILATGYNGFPAGVKERPERWERPVKYSYIVHSEANIVASAARFGINLTGSTLFVTLHPCVDCAKIVASAGFKNVIYIDTEIKPQVGREWITLLQHSKNIFEESRIGLYACREVPAKKKEEPKLYKTFKGTVETTVELNNKRDKQLGDLIFVRSRNTLYEWNGVIWTVIGEYQHLL

SEQ ID NO: 19 - protein, 142 aa, unidentified
MREFIKAARDEAAKSRCDRAHVGCVIVDRATGRVVSRAFNETPHGLEPCDTGGHRMIDGHCVNTVHAERGAIRKMQSHDSEYTLYVTHYPCQGCAHLIASCPDIVEVVYLGDYRNSNEATALLMGLSKGVHHAEEDCSSSPA

SEQ ID NO: 20 - protein, 142 aa, unidentified
MREFIKAARDEAAKSRCDRAHVGCVIVDRATGRVVSRAFNETPHGLEPCDTGGHRMIDGHCVNTVHAERGAIRKMQSHDSEYTLYVTHYPCQGCAHLIASCPEIVEVVYLGDYRNSNEATALLMGLSKGVHHAEEDCSSSPA

SEQ ID NO: 21 - protein, 142 aa, unidentified
MREFIKAARDEAAKSRCDRAHVGCVIVDRATGRVVSRAFNETPHGLEPCDTGGHRMIDGHCVNTVHAERGAIRKMQTHDSEYTLYVTHYPCQGCAHLIASCPEIVEVVYLGDYRNSNEATALLMGLSKGVHHAEEDCSSSPA

SEQ ID NO: 22 - protein, 142 aa, unidentified
MREFIKAARDEAAKSRCDRAHVGCVIVDRATGRVVSRAFNETPHGLEPCDTGGHRMIDGHCVNTVHAERGAIRKMTSHDSEYTLYVTHYPCQGCAHLIASCPEIVEVVYLGDYRNSNEATALLMGLSKGVHHAEEDCSSSPA

SEQ ID NO: 23 - protein, 136 aa, unidentified
MRELGIKAARDEAKKSRCDRAHVGCVIIDRASGQVVSRAFNETPPTLEPCDTGGHRMVDGHCVNTVHAERGAIRKMAEHGSEYTLYVTHYPCRGCAHLISSCPEIVEVVYLGDYNNSSEATALLMSLSKGVHRVKG

SEQ ID NO: 24 - protein, 135 aa, unidentified
MREYIKAARDEAAKSRCDRAHVGCVIVDHATGQVVSRAFNETPHGLEPCDTGGHRIVDNHCVNTVHAERNAIRKMKEHGSEYTLYVTHYPCRGCAHLISTCPEIVEVVYLGDYNNSSEATALLEGLSKGVHRGEE

SEQ ID NO: 25 - protein, 135 aa, unidentified
MREYIKAARDEAAKSRCDRAHVGCVIVDRATEQVVSRAFNETPNGLEPCDTGGHRIVDDHCVNTVHAERNAIRKMREHGSEYTLYVTHYPCQGCAHLISSCPEIVEVVYLGDYNNSSEATALLSGLSKGVHRGEE

SEQ ID NO: 26 - protein, 36 aa, unidentified
MREYIKAARDEAAKSRCDRAHVGCVIVDRATGQVVS

SEQ ID NO: 27 - protein, 135 aa, unidentified
MREYIKAARDEAAKSRCDRAHVGCVIVDRATGQVVSGAFNETPHGLEPCDTGGHRIVDGHCVNTVHAERNAIRKMKEHGSEYTLYVTHYPCRGCAHLISSCPEIVEVVYLGDYNNSSEATALLSGLSKGVHRGEE

SEQ ID NO: 28 - protein, 135 aa, unidentified
MREYIKAARDEAAKSRCDRAHVGCVIVDRATGQVVSRAFNETPHGLEPCDTGGHRIVDNHCVNTVHAERNAIRKMKEHGSEYTLYVTHYPCQGCAHLISSCPEIVEVVYLGDYRNSSEATALLSGLSKGVHRGEE

SEQ ID NO: 29 - protein, 135 aa, unidentified
MREYIKAARDEAAKSRCDRAHVGCVIVDRATGQVVSRAFNETPHGLEPCDTGGHRIVDNHCVNTVHAERNAIRKMTDHGSEYTLYVTHYPCQGCAHLISSCPEIVEVVYLGDYNNSSEATALLSGLSKGVHRGEE

SEQ ID NO: 30 - protein, 135 aa, unidentified
MREYIKAARDEAAKSRCDRAHVGCVIVDRATGQVVSRAFNETPHGLEPCDTGGHRMVDDHCVNTIHAERNAIRQMKEHGSEYTLYVTHYPCRGCAHFISTCPEIVEVVYLGDYRNSSEATALLSGLSKGVHRGEE

SEQ ID NO: 31 - protein, 40 aa, unidentified
MREYIKAARDEAAKSRCDRAHVGCVIVDRATGQVVSSAFN

SEQ ID NO: 32 - protein, 135 aa, unidentified
MREYIKAARDEAAKSRCDRAHVGCVIVDRATGQVVSSAFNETPHGLEPCDTGGHRIVDNHCVNTVHAERNAIRQMTDHGSEYTLYVTHYPCQGCAHLIASCPEIVEVVYLGDYNNSSEATALLSGLSKGVHRGEE

SEQ ID NO: 33 - protein, 142 aa, unidentified
MREYIKAARDEAAKSRCDRAHVGCVIVDRATGRVVSRAFNETPHGLEPCDTGGHRMIDGHCVNTVHAERNAIRKMPSHDSEYTLYVTHYPCQGCAHLIASCPDIVEVVYLGDYRNSEEATALLMGLSKGIHCAEEDRSSSPA

SEQ ID NO: 34 - protein, 142 aa, unidentified
MREYIKAARDEAAKSRCDRAHVGCVIVDRATGRVVSRAFNETPHGLEPCDTGGHRMIDGHCVNTVHAERNAIRKMPSHDSEYTLYVTHYPCQGCAHLIASCPDIVEVVYLGDYRNSEEATALLMGLSKGVHCAEEDRSSSPA

SEQ ID NO: 35 - protein, 135 aa, unidentified
MREYIKAARDEAKKSRCDRAHVGCVIVDRASGQVVSSAFNETPPGLEPCDTGGHRMVDDHCVNTVHAERGAILKMAEHGSEYTLYVTHYPCRGCAHLISSCPEIVEVVYLGDYNNSSEATTLLMSLSKGVHHVEG

SEQ ID NO: 36 - protein, 135 aa, unidentified
MREYIKAARDEAKKSRCDRAHVGCVIVDRATGQVVSKGFNETPPGLEPCDTGGHHIVDNHCVNTVHAERSAIRKMTEHGSEYTLYVTHYPCRGCAHLITSCPEIMEVVYLGDYNNSSEATELLMGLSKGVHHVEG

SEQ ID NO: 37 - protein, 135 aa, unidentified
MREYIKAARDEAKKSRCDRAHVGCVIVDRATGRVVSRAFNETPHGLEPCDTGGHRIVDDHCVNTVHAERNAIRRMVEHGSEYTLYVTHYPCQGCAHLISSCPEIVEVVYLGDYNNSSEATALLSGLSKGVHRGEE

SEQ ID NO: 38 - protein, 135 aa, unidentified
MREYIQAARDEAKKSRCDRAHVGCVIVDRASGQVVSSAFNETPPGLEPCDTGGHRMVDGHCVNTVHAERGAIRKMAEHGSEYTLYVTHYPCRGCAHLISSCPEIMEVVYLGDYNNSSEATTLLMGLSKGVHHVEE

SEQ ID NO: 39 - protein, 135 aa, unidentified
MREYIQAARDEAKKSRCDRAHVGCVIVDRATGRVVSSAFNETPPGLEPCDTGGHRMVDGHCVNTVHAERGAIRKMAEHGSEYTLYVTHYPCRGCGHLISSCPEIVEVVYLGDYNNSSEATALLMGLSKGVHHVEE

SEQ ID NO: 40 - protein, 135 aa, unidentified
MREYIQAARDEASKSRCDRAHVGCVIVDRATGQVVSRAFNETPHGLEPCDTGGHRIVDNHCVNTIHAERNAIRKMPTHDSEYTLYVTHYPCQGCAHLISSCPEIVEVVYLGDYRNSSEATALLSGLSKGVHRGEE

SEQ ID NO: 41 - protein, 135 aa, unidentified
MREYIRAARDEAAKSRCDRAHVGCVIVDRATGQVVSRAFNETPHGLEPCDTGGHRIVDNHCVNTVHAERNAIRKMTEHGSEYTLYVTHYPCQGCAHLISSCPEIVEVVYLGDYNNSSEATALLEGLSKGVHRGEE

SEQ ID NO: 42 - protein, 135 aa, unidentified
MREYIRAARDEAAKSRCDRAHVGCVIVDRATSRVVSRAFNETPHGLDPCDTGGHRMIDGHCVNTVHAERNAIRKMPSHDSEYTLYVTHYPCQGCAHLIASCPDIVEVVYLGDYRNSKEATALLMGLSKGIHHAEE

SEQ ID NO: 43 - protein, 151 aa, unidentified
MRVRPDWDTYFMRIAKVVAQRSHDEDTQVGCVIVSPDKRILSTGYNGFPPGFPDGKLPRTRPGKYPYIVHSEINAIVSALNRDLRGATLYCRFTPCKDCVKAIITAGITRIVYEETYARDNTDAAVVFEMLEMGGVEIVKHLEHEHEADSD

SEQ ID NO: 44 - protein, 159 aa, unidentified
MSNTQSLHTTFMHILFEFSKLSHCVSKQVAAMAVKDGRIISTGINGTAPGYTNCDDIFNKSDFDRELHHQFSNTYEIHAEMNMILYAAKNGISLDGATLYCSMLPCWNCIKHISVTGIKHIIYAKRYDMLSLEDEKNIYYYCKKLGITIQQFDPDTLGS

SEQ ID NO: 45 - protein, 160 aa, unidentified
MSNTQSLHTTFMHILFEFSKLSHCVSKQVAAMAVKDGRIISTGINGTAPGYTNCDDIFNKSDFDRELHHQFSNTYEIHAEMNMILYAAKNGISLDGATLYCSMLPCWNCIKHISVTGIKHIIYAKRYDMLSLEDEKNIYYYCKKLGITIQQFDPDTLGSF

SEQ ID NO: 46 - protein, 124 aa, unidentified; identical to SEQ ID NO: 5

SEQ ID NO: 47 - protein, 80 aa, unidentified
MVDGHCVNTVHAERGAIRKMTEHGSEYTLYVTHYPCRGCAHLISSCPEIVEVVYLGDYNNSSEATALLMGLSKGVHHVEG

SEQ ID NO: 48 - protein, 150 aa, unidentified
MTACKDKPVCNVAQADATLLSTCLRLLQTAHEIKQNAYAPYSGFQVGAAVLAKNGSIITGVNVENGSLGLTICAERTALSKAVSEGYRPGDFVAIAVAASADGFSPCGACREVINEFGQNMLVVFEYQDEVVVAPLKTLLAYNFVKGKPS

SEQ ID NO: 49 - protein, 62 aa, unidentified
MAYRPGDFVAIAIAASSPDFSPCGACREVINEFGDDMAVIFEIKGETVVSQLKEHLPYNFKM

SEQ ID NO: 50 - protein, 250 aa, unidentified
MQHVKHMRTAVRLARYALDHDETPVACIFVHTPTGQVMAYGMNDTNKSLTGVAHAEFMGIDQIKAMLGSRGVVDVFKDITLYVTVEPCIMCASALKQLGIGKVVFGCGNERFGGNGTVLSVNHDTCTLVPKNNSAAGYESIPGILRKEAIMLLRYFYVRQNERAPKPRSKSDRVLDKNTFPPMEWSKYLNEEAFIETFGDDYKTCFANKVDLSSNSVDWDLIDSHQDNIIQELEEQCKMFRFNVHKKSKV

SEQ ID NO: 51 - protein, 239 aa, unidentified
MLLNKRSYGHFYFIALMTEFSKWDEYYMKLALMEAEKALNSNEVPIGCVFVKSDTEVEIPPLPSRYSKDEFHSSVIASGRNFTNENYNATHHAEIMALTDLISCLECNCKKIDNMGEPCKPTFSKDTECPQCNFNLKNVTLYVTIEPCIMCISALMELQVSRIVFGANNDKFGGCGGTLTNVPEILKDTCSKDFEEIKIERGLYREEAVILLRKFYLIQNPKAPNPKKKAKRTLNLIVD

SEQ ID NO: 52 - protein, 87 aa, unidentified
MSKTIKDLEEFAAEKLGYDIVFQESISMEPQEVEHLITTDEKSVLVNSTYDDNKEITISMISTPHPEYRPIALIIQDMEGEVQRKEL

SEQ ID NO: 53 - protein, 88 aa, unidentified
MSKTIKDLEEFAAEKLGYDIVFQESISMEPQEVEHLITTDEKSVLVNSTYDDDKEITISVISTPHPEYRPIALVIQDMEGEVQRKELY

SEQ ID NO: 54 - protein, 84 aa, unidentified
MTNLSDIIEKETGKQLVIQESILMLPEEVEEVIGNKPESDILVHTAYDESTDENVMLLTSDAPEYKPWALVIQDSNGENKIKML

SEQ ID NO: 55 - protein, 67 aa, unidentified
MIVRVTYNVEQEVEISNKFNKDVDIMKPEEYDDYIDDLMFALNEKLPEYAEISCVINDNTGEVLFEG

SEQ ID NO: 56 - protein, 35 aa, unidentified
MSKTIKDLEEFAAEKLGYDIVFQESISMEPQEVEH

SEQ ID NO: 57 - protein, 167 aa, Escherichia coli
MSEVEFSHEYWMRHALTLAKRAWDEREVPVGAVLVHNNRVIGEGWNRPIGRHDPTAHAEIMALRQGGLVMQNYRLIDATLYVTLEPCVMCAGAMIHSRIGRVVFGARDAKTGAAGSLMDVLHHPGMNHRVEITEGILADECAALLSDFFRMRRQEIKAQKKAQSSTD

SEQ ID NO: 58 - protein, 229 aa, Rattus norvegicus [sequence omitted]

SEQ ID NO: 59 - protein, 251 aa, Heterocephalus glaber
MAVGSKPKAALVGPHWERERIWCFLCSTGLGTQQTGQTSRWLRPAATQDPVSPPRSLLMKQRKFLYHFKNVRWAKGRHETYLCYVVKRRDSATSFSLDFGYLRNKSGCHVELLFLRYISDWDLDPGRCYRVTWFTSWSPCYDCARHVADFLRGNPNLSLRIFTARLYFCEDRKAEPEGLRRLHRAGVQIAIMTFKDYFYCWNTFVENHERTFKAWEGLHENSVRLSRQLRRILLPLYEVDDLRDAFRTLGL

SEQ ID NO: 60 - protein, 224 aa, Petromyzon marinus
MAGYECVRVSEKLDFDTFEFQFENLHYATERHRTYVIFDVKPQSAGGRSRRLWGYIINNPNVCHAELILMSMIDRHLESNPGVYAMTWYMSWSPCANCSSKLNPWLKNLLEEQGHTLTMHFSRIYDRDREGDHRGLRGLKHVSNSFRMGVVGRAEVKECLAEYVEASRRTLTWLDTTESMAAKMRRKLFCILVRCAGMRESGIPLHLFTLQTPLLSGRVVWWRV

SEQ ID NO: 61 - protein, 208 aa, Petromyzon marinus
MTDAEYVRIHEKLDIYTFKKQFFNNKKSVSHRCYVLFELKRRGERRACFWGYAVNKPQSGTERGIHAEIFSIRKVEEYLRDNPGQFTINWYSSWSPCADCAEKILEWYNQELRGNGHTLKIWACKLYYEKNARNQIGLWNLRDNGVGLNVMVSEHYQCCRKIFIQSSHNQLNENRWLEKTLKRAEKRRSELSIMIQVKILHTTKSPAV

SEQ ID NO: 62 - protein, 199 aa, Homo sapiens
MEASPASGPRHLMDPHIFTSNFNNGIGRHKTYLCYEVERLDNGTSVKMDQHRGFLHNQAKNLLCGFYGRHAELRFLDLVPSLQLDPAQIYRVTWFISWSPCFSWGCAGEVRAFLQENTHVRLRIFAARIYDYDPLYKEALQMLRDAGAQVSIMTYDEFKHCWDTFVDHQGCPFQPWDGLDEHSQALSGRLRAILQNQGN

SEQ ID NO: 63 - protein, 198 aa, Homo sapiens [sequence omitted]

SEQ ID NO: 64 - protein, 197 aa, Lampetra planeri
MAGDENVRVSEKLHFNTFEFEFENLHYAEGRGQTYVIFDVKPQSEGGRGERLWGYVRNKPLGDHAEVILMSKINDHLETHQDNYTMTWYMSWSPCGKCSSELVPWLQNLLKKQHKLTMHFSRIYDKDRAVDHRGLCDLQHVVSNGFQMGVMGQTEVDTCLAEYVEASGCPPLKWLHMTDSNATQMQDKLSSILMNRF

SEQ ID NO: 65 - protein, 198 aa, Lampetra planeri
MAGDENVRVSKKLDFNTFEFEFENLHYAEGRGRTYVIFDVKPQSEGGRGERLWGYVRNNPLDDHAEVILMSKINDHLETHQGNYTMTWYMSWSPCGNCSSELVPWLQNLLEEQQHTLTMYFSRIYDKDRAVDHRGLCDLQHVVSNGFQMGVMGQTEVDTCLAEYVEASGCPPLKWLHMTDSNATQTQDKLSSILMNRF

SEQ ID NO: 66 - DNA, 642 bp, Lampetra planeri
  source 1..642: mol_type = other DNA
gccaacgccgagtacgtgcgcgtgggcgagaagctggacagctgcaccttccgcacccagttcctgaactaccgccgcagccgcagccgccgctgctgcgtgatcttcgagctgaagcgccagaacagccgcgtgcgcttctggggctacgccatgaacaagccctggagcaacgccgacgtgggcatccacgccgagttcttctgcatcaagaaggtgaagaagtacctgcgcaagaaccccggcatctacaccatcaactggtacagcagctggagcccctgcgccaactgcgccgagaagatcctgaactggtacaacaagaagctgatgggcaagggccacaccctgaagatttgggcctgcaagctgtacttcgagaacatcaagcgcaaccagatcggcctgtggaacctgcgcaacaacggcgtgggcctggccatcatgctgggcgagcactaccagtggtgctggaacaactacatccagaccctgggccgcaacctgaacgagaacaagtggctgaaaaagaccagcaaccgcgcccgcacccgccgcagcgagctgagcatcatgatccacgtgaagcgcctgcacaccgcccgcctgctgctgttcaagcgcctgtgcggctggttcagc

SEQ ID NO: 67 - protein, 84 aa, unidentified; identical to SEQ ID NO: 54

SEQ ID NO: 68 - protein, 1245 aa, synthetic construct
MGSSHHHHHHSEVEFSHEYWMRHALTLAKRARDEREVPVGAVLVLNNRVIGEGWNRAIGLHDPTAHAEIMALRQGGLVMQNYRLIDATLYSTFEPCVMCAGAMIHSRIGRVVFGVRNAKTGAAGSLMDVLHYPGMNHRVEITEGILADECAALLCYFFRMPRRVFNAQKKAQSSTDSGGSSGGSSGSETPGTSESATPESSGGSSGGSMKKKVFAFALGKASIGYCVRDGFNINEANSIIIDKDHAETMSLRDRRRIKKTLDAHHAREEYFNKVWSGVGLNILDKNNNNFKKEFPSKNEDVIYTSCLLRIALLQNQKLEEWQIYKALYNAFQRRGYDVNIAWKSVQTDDDKENIERMKKYTCENDIELIISDEYKYPCYYDALRLGLWNEDEPTKLNRSIPQHNSNKVRTTEYVAPRELVEKELKQLWLNAQLQLPQLNSISAEEFLYGEYKIPYGSCVQKEFKQYRGTKKDWQGVLCQKIPRFDNRIIAKCKLLPKRNVCKANTIENVSFVLLMKLKNLRFTVISGEKLRLSPVQIKQIYENWLEKVEDTYNKDLEKAEKLGKENPEKRLNITITRQEIEKIIGEKIIDKIEPMKADISGRSSFCRRACQIMNKIILDGELYPQNVDISEFVDRDNAKNGITEEEIQSMLSKIGDWNNLYIPDNREENAQNASNSRIKTDIMLGNITNPIVRNRLQIFRDLLLNLAEKYGTPDEVIFEFVRDGADNSLYGSKKAQDTERFMKQQEKENEQIINELKDAGLYVNGQNHANATYFLMHKLLKSQGGKCIYSGQNISPSNYDECEIDHIYPRTLGGNDALYNKVVCYRRENQDKKGRTPYEWLSPDSDKWANYVNRLNKIKKQLGKKKFELLTSKPEDCEKLIESYNGLAETSHIARVAQQMTAFIFGWGLQIQGESRRIFVNNGSSTCAIRKRYGLNKLLGDNLKKNRSNDKHHALDAICISFSRDFKYDKEIKKDIIKGFNPEIVKNAIDKIMPYPYANDKPFKGNTKPLETIYGLRTYGDKSYITQRVELNSIDKKATKIKSIIDETIKNDLLNKLKENPTEQEWKLMLQNYIHPKKQTKVKKVMISVSEGEITKDSNNRERMGEFVDFGTKGTQHQFKHSKRHKGQILYFNEKGVVEVMPVYSNIKTTDVKDKLQNMGCKLYNKGQMFYSGCLVDIPKPFKAGSKEYPAGRYQIKTIRSDKVAELEDACGNKISTNVKYLVPAEFKKVESKGSGGSPKKKRKV

SEQ ID NO: 69 - protein, 1380 aa, synthetic construct
MGSSHHHHHHMSSETGPVAVDPTLRRRIEPHEFEVFFDPRELRKETCLLYEINWGGRHSIWRHTSQNTNKHVEVNFIEKFTTERYFCPNTRCSITWFLSWSPCGECSRAITEFLSRYPHVTLFIYIARLYHHADPRNRQGLRDLISSGVTIQIMTEQESGYCWRNFVNYSPSNEAHWPRYPHLWVRLYVLELYCIILGLPPCLNILRRKQPQLTFFTIALQSCHYQRLPPHILWATGLKSGSETPGTSESATPESAMKKKVFAFALGKASIGYCVRDGFNINEANSIIIDKDHAETMSLRDRRRIKKTLDAHHAREEYFNKVWSGVGLNILDKNNNNFKKEFPSKNEDVIYTSCLLRIALLQNQKLEEWQIYKALYNAFQRRGYDVNIAWKSVQTDDDKENIERMKKYTCENDIELIISDEYKYPCYYDALRLGLWNEDEPTKLNRSIPQHNSNKVRTTEYVAPRELVEKELKQLWLNAQLQLPQLNSISAEEFLYGEYKIPYGSCVQKEFKQYRGTKKDWQGVLCQKIPRFDNRIIAKCKLLPKRNVCKANTIENVSFVLLMKLKNLRFTVISGEKLRLSPVQIKQIYENWLEKVEDTYNKDLEKAEKLGKENPEKRLNITITRQEIEKIIGEKIIDKIEPMKADISGRSSFCRRACQIMNKIILDGELYPQNVDISEFVDRDNAKNGITEEEIQSMLSKIGDWNNLYIPDNREENAQNASNSRIKTDIMLGNITNPIVRNRLQIFRDLLLNLAEKYGTPDEVIFEFVRDGADNSLYGSKKAQDTERFMKQQEKENEQIINELKDAGLYVNGQNHANATYFLMHKLLKSQGGKCIYSGQNISPSNYDECEIDHIYPRTLGGNDALYNKVVCYRRENQDKKGRTPYEWLSPDSDKWANYVNRLNKIKKQLGKKKFELLTSKPEDCEKLIESYNGLAETSHIARVAQQMTAFIFGWGLQIQGESRRIFVNNGSSTCAIRKRYGLNKLLGDNLKKNRSNDKHHALDAICISFSRDFKYDKEIKKDIIKGFNPEIVKNAIDKIMPYPYANDKPFKGNTKPLETIYGLRTYGDKSYITQRVELNSIDKKATKIKSIIDETIKNDLLNKLKENPTEQEWKLMLQNYIHPKKQTKVKKVMISVSEGEITKDSNNRERMGEFVDFGTKGTQHQFKHSKRHKGQILYFNEKGVVEVMPVYSNIKTTDVKDKLQNMGCKLYNKGQMFYSGCLVDIPKPFKAGSKEYPAGRYQIKTIRSDKVAELEDACGNKISTNVKYLVPAEFKKVESKGSGGSTNLSDIIEKETGKQLVIQESILMLPEEVEEVIGNKPESDILVHTAYDESTDENVMLLTSDAPEYKPWALVIQDSNGENKIKMLSGGSPKKKRKV

SEQ ID NO: 70 - protein, 1025 aa, synthetic construct
MKKKVFAFALGKASIGYCVRDGFNINEANSIIIDKDHAETMSLRDRRRIKKTLDAHHAREEYFNKVWSGVGLNILDKNNNNFKKEFPSKNEDVIYTSCLLRIALLQNQKLEEWQIYKALYNAFQRRGYDVNIAWKSVQTDDDKENIERMKKYTCENDIELIISDEYKYPCYYDALRLGLWNEDEPTKLNRSIPQHNSNKVRTTEYVAPRELVEKELKQLWLNAQLQLPQLNSISAEEFLYGEYKIPYGSCVQKEFKQYRGTKKDWQGVLCQKIPRFDNRIIAKCKLLPKRNVCKANTIENVSFVLLMKLKNLRFTVISGEKLRLSPVQIKQIYENWLEKVEDTYNKDLEKAEKLGKENPEKRLNITITRQEIEKIIGEKIIDKIEPMKADISGRSSFCRRACQIMNKIILDGELYPQNVDISEFVDRDNAKNGITEEEIQSMLSKIGDWNNLYIPDNREENAQNASNSRIKTDIMLGNITNPIVRNRLQIFRDLLLNLAEKYGTPDEVIFEFVRDGADNSLYGSKKAQDTERFMKQQEKENEQIINELKDAGLYVNGQNHANATYFLMHKLLKSQGGKCIYSGQNISPSNYDECEIDHIYPRTLGGNDALYNKVVCYRRENQDKKGRTPYEWLSPDSDKWANYVNRLNKIKKQLGKKKFELLTSKPEDCEKLIESYNGLAETSHIARVAQQMTAFIFGWGLQIQGESRRIFVNNGSSTCAIRKRYGLNKLLGDNLKKNRSNDKHHALDAICISFSRDFKYDKEIKKDIIKGFNPEIVKNAIDKIMPYPYANDKPFKGNTKPLETIYGLRTYGDKSYITQRVELNSIDKKATKIKSIIDETIKNDLLNKLKENPTEQEWKLMLQNYIHPKKQTKVKKVMISVSEGEITKDSNNRERMGEFVDFGTKGTQHQFKHSKRHKGQILYFNEKGVVEVMPVYSNIKTTDVKDKLQNMGCKLYNKGQMFYSGCLVDIPKPFKAGSKEYPAGRYQIKTIRSDKVAELEDACGNKISTNVKYLVPAEFKKVESK

SEQ ID NO: 71 - protein, 1059 aa, synthetic construct
MEKEKNNHVWGFAIGKGSLGEAVRVGGDFKHIASVLLDPEFGEIKTAALARRQMRTRKAHKAREKWLEECLDGTGVEILKRREVGIVDGQWRLISKGDERLEREFPPNGEEVCYNSIALRCKLLLGEKLEGWQVFKALNSAIQKRGYDENIPWGEAEEKSSKKDEDDYAQKLSQYEREKSELFESFADGEKYDFPCFFKAYKMGLWSPENPRRVEVRIDCRAQKAKSYVVARKYVEREFECLVEAAAKFFPKLKGRAKFILYGVSETPYASYYGNMRKKFGLKRGAESDWTALGQKVPRFDNRIIDKCRLIPRMNVCKIRPLNEARNEKDLLYYEVTLALKLLNLRFFRNSNIEQLTFEEFKKAFEIASGAKYKMTKTAMKKFLKSISATALGDDYAEIEPPKESGRASFSRPAMDILKELIFSGMPPREFYGRKIPEISNTDKNKGVVASDLDFIKLMGDCPWGGIFIPDVQTYQFANAAFPNPDAQINKLIGSQNNPIVRHRLTFFFERIKFLESKYGVPDKVVLEFVRDDFMGEKEKKEMRIAMKKRAEEKMMIAKDLDEHGFKGGNLLLKMELYRKQNGICLYTGDALPLSELATLEIEHIVPRSRGGPDAQYNYVITREKTNKLKGDKTPYEWLSSDAKEWASYTDRVNACAKALGKKRCRLLLEKDAEELVEKYTALAETAHIAKLAQKIVCMHFGFQFGGLSGTKRVFTVPGALTSRIRKFYGLDRILHNAAAESENLSFEEFLKFSEDLEKKNRKNKKHHALDAMCLCFAPTGVDSRRAKLGEILPEKLRSEKAAREFFKSYLDKIMPVDVAPKKPRLEDGIYSKRIIGGKACMVKRNNLVDLAYKSGLKPVFDIPTLIKLVDKKEKGIINPQIRKMIGEFAATNPDESAWRKWCEEVRLPSKSGLGARVLRVLVYYGEADEYKDLSKDGCGAYRKGDGHKGQVVWESVDGKYYVEPVYVHASKAGVMAALNANPKKKRICGMFNSHCTVDVGDVYNDRGDFILPAGRYMVNTILTTGRCVLTNADGEKRNPININYLMRAGMRRVELSEL

SEQ ID NO: 72 - protein, 1134 aa, synthetic construct
MSTDMKNYRIGVAVGDRSVGLAAIEFDDDGLPIQKLALVTFRHDGGLDPTKNKTPMSRKETRGIARRTMRMNRERKRRLRNLDNVLENLGYSVPEGPEPETYEAWTSRALLASIKLASADELNEHLVRAVRHMARHRGWANPWWSLDQLEKASQEPSETFEIILARARELFGEKVPANPTLGMLGALAANNEVLLRPRDEKKRKTGYVRGTPLMFAQVRQGDQLAELRRICEVQGIEDQYEALRLGVFDHKHPYVPKERVGKDPLNPSTNRTIRASLEFQEFRILDSVANLRVRIGSRAKRELTEAEYDAAVEFLMDYADKEQPSWADVAEKIGVPGNRLVAPVLEDVQQKTAPYDRSSAAFEKAMGKKTEARQWWESTDDDQLRSLLIAFLVDATNDTEEAAAEAGLSELYKSWPAEEREALSNIDFEKGRVAYSQETLSKLSEYMHEYRVGLHEARKAVFGVDDTWRPPLDKLEEPTGQPAVDRVLTILRRFVLDCERQWGRPRAITVEHTRTGLMGPTQRQKILNEQKKNRADNERIRDELRESGVDNPSRAEVRRHLIVQEQECQCLYCGTMITTTTSELDHIVPRAGGGSSRRENLAAVCRACNAKKKRELFYAWAGPVKSQETIERVRQLKAFKDSKKAKMFKNQIRRLNQTEADEPIDERSLASTSYAAVAVRERLEQHFNEGLALDDKSRVVLDVYAGAVTRESRRAGGIDERILLRGERDKNRFDVRHHAVDAAVMTLLNRSVALTLEQRSQLRRTFYEQGLDKLDRNQLKPEEDWRDFTGLAPASQEKFLEWRKAATILGDLLAEAIEDDSIAVVSPLRLRPQNGSVHLETISAVKKQTLGSDWPADAVKRIVDPEIYLAMKDALGKLKELPEDSARSLELPDGRFVEADDEVLFFPENAASILTPRGVAEIGGSIHHARLYGWLTKKGELKVGMLRVYGAEFPWLMRESGSRNVLSMPIHRGSQSFRDMQDTTRKAVESGEAVEFAWITQNDELEFDPDDYIAHGGKDELRQFLGFMPECRWRVDGFKKNYQIRIRPAMLSREQLPSDIQRRLESKTLTKNESLLLKALDTGLVVAIGGLLPLETLKVIRRNNLGFPRWRGNGNLPTSFEVRSSALRALGVEG

SEQ ID NO: 73 - protein, 1131 aa, synthetic construct
MSEHTKYRIGIAVGDRSVGLAAIEFDDDGFPLSNLAMVTYRHDGGLDPTTNKSPKSRKETRGVALRTMRMRRRKKSRLKDLDKTLRALGYVVPACEEPQTYEAWKSRALLATTKVEGAQELGEHLVRAVRHMARHRGWRNPWWTFNQLEIASTAPSDTFAKIRERAEKEWPGVVPEEATLGMIGALAASNNVLLRPRTYRKDQPRHSKKLNVLGQEPILVDKVRQEDLLAELRTICKKQDIEDQYEKLAQAVFEQTRPYVPLDRVGKDPLQPNKSRASRASLEFQRFRILDAVAHLRVRVGASDRRALTDEEHDKAVHFLMGYSKKDVPTWGDVADEIGVEPAHLIAPVIDDVRLNKAPYDRSSTEFEQKMKKKTRARQWWDEANLESRSQLILLVSDPTDETMRLAEVSGLYEVFESWPDEEKEALEGLKVESGRAAYSTDTLNKLSDHMRLKRIDLHEARKIAFGVDDMWHPPLDRIDEPTGQPTVDRVLTIVRRFIFDCERAWGCPENVVIEHARTGLMGPAQRADVLNEIAKNRKKNDKIREDLRAGGINNPTRADIRRNAIVQDQESQCLYCGATIGVSYSELDHIVPRAGGGSSRRENLAAVCRACNDSKKDTPFAVWAKNTSRPVTLEGTIQRLRELKAFKRPKDRRMVDLIIRRLKQTEKDDPIDERSLASTSYAATAIRERIEQYFNEKAEKLDLAKVHIDVYSGSLTRESRRAGGIDKMVLLRGQSDKNRFDVRHHAIDAAVLTLLNRSVAVTLEQRRLIKQQREYSLEKSRRERDNVWRDFMGLGPAAQEKFAKWKKTAYVLADIIKEAISNDAIPVVSPLRLRPQNGSVHLDTVDAVLERTIGDAWTVDQVHRIVNPQIYLAFAGYLGNQKALDPDSSRVLALNDGRKLTAEDVIYVFPEKAASILTPRGVVKIGESVHHVRLYAWKNRKGKAEVGMLRVFGAEFPWLMRESGVKDVLRVPIHTGSQSYRDLSFTVRKNIEKGEAAEIGWLTQNEELEFNPESYLQEGGKDKLAKFLAFLPETRWRVDGFPMPDKLRIRPALLSREEIPEGVFRTEEQSLLEEALTKGLIIATKGLLSLPDVKVLRRNNLGIPRWRGGSYRPVSLDIQRAALAALDEQE

SEQ ID NO: 74 - protein, 1132 aa, synthetic construct
MSTDMKNYRIGVAVGDRSVGLAAIEFDDAGFPIQKLALVTFRHDGGLDPTDNPKSRKETRGEARRRMRMTRRRKQRLRDLDKVLENLGYTVPEGPEPETYEAWTSRALLASIKLASADELNEHLVRAVRHIARHRGWVNPWWSLDQLERASQEPSETFEIILARARELFGERVPANPTLGMLGALAANNEVLLRPRAEKKKKTGYVRGTPLLAAQVRQIDQVAELRRICEVQGIEEQYETLRNAIFAHKVAYVPTERVGKDPLAPSKNRTIRASLEFQEFRILDSVANLRVRTDSRAKRELTEGEYDAAVEFLMGYTAKEQPSWADVAEEIGVPGNRLIAPVLEDVQQKTAPFDRSSAAFEKAMSKRTEARQWWEANDDDQLRSLFIMFLADATNDTEEAAAVAGLPELYMSWPAEEREALSNIDFEKGRVAYSHETLSKLSEYMHEHRVGLHEARKAVFGVDDTWRPPLAKLEEPTGQPTVDRVLTILRRFVLDCERQWGRPRAITVEHARIGLVGPAQRQNILKEQEDNRKNNECIRDELRKSGVENPSRTEVRRHLVVQDQESQCLYCGAVIRTDTSELDHIVPRAGGGSSRRENLAAVCRYCNSKKDRTLFYDWAGSVRLQETIDRVRQLKAFKDSKKAKMFKNQIRRLRQTEADEPIDERSLASTSYAAVAVRERLEQHFNEGLAPDDKNRVVLDVYAGSVTRESRRAGGIDERILLRGERDKNRFDVRHHAIDAAVMTLLNRSVALTLEQRSQLRRAFYEQGLDKLDRDQLKPEEDWRNFIGLSLASQEKFLEWKKVTTVLGDLLAEAIEDDSIAVVSPLRLRPQNGRVHKDTIAAVKKQTLGSAWSADAVKRIVDPEIYLAMKDALGKSKVLPEDSARTLELSDGRYLEADDEVLFFPKNAASILTPRGVAEIGGSIHHARLYSWLTKKGELKIGMLRVYGAEFPWLMRESGSHDVLRMPIHPGSQSFRDMQDTTRKAVESSEAVEFAWITQNDELEFEPEDYIAHGGKDELRQFLEFMPECRWRVDGFKKNYQIRIRPAMLSREQLPSDIQRRLESKTLTENESLLLKALDTGLVVAIGGLLPLGTLKVIRRNNLGFPRWRGNGNLPTSFEVRSSALRALGVEG

SEQ ID NO: 75 - protein, 1055 aa, synthetic construct
MGDQQTLQATSYCLGLAVGVQGVGWAVIDLDDQGQPLGVRRTGVRCFDSGVGSETEFEKGVDEPPSTKRRQARQQRRQLWRRAQRQRRVFRALQEAGLLPPGPPTPVSRDKILRTLDADLAIQFGSLEDRIAAHLLPYRLRALALDTPLPPYALGRAFYHLAQRRGFLSNKKALKEEKEAGEVKKGIAELQEEMNRAGARALGEYFSSLDPEQRRIRNRWTARQMYLDEFDRVWEAQSRYHPRLTDELKTKVRRAIFFQRPLKSQKGLIGRCELEPRHRRAPLASLLAQRFRYWQKINDLEVIQPDGVVRPLSPEERHKLAHFLETQAEATFARIRKLLDLKKPKGSQEDFAFNLERGGEKRILGNRTAAKMAAVLGQRWAAMDDEDKRRLVNEILSFEKEAPLARRLVRAWNLDEPTAAQLAALDFEPGYAALSARAIRKLLPLMQREGMRFATARKQVYGDHLLGTRAYDALPPVAKAIPSLRNPAVCRALTEVRKVVNALVRAYGKPAMVRIELARDMKRGRKQRKETWQAMRENERCRLDARKLLQDHGIQEPRPADILKVLLAEECNWECPYTGKAISMDALIGSQPQFDVEHIIPFSRSLDNSFLNKTLCYHEENRNVKQNRTPFEAYGGDEQRWHEILQRVRRFRGSAAESKLRKFQLRQLPADFTNRHLNDTRYASRLAADYLALLYGGRVDANGRQRVQVGTGATTGFLRDEWGLNAILGDNDEKERADHRHHAIDAVVIALTGPGTVQALTRAALRAKELGRRLFVPLDPPWADRDSFLRDVRASVEAITVSYRVDRKVSGQLHEESNYSKPHMTVDNKGNLVEHRHIRKPLKDMSVEEVEAIVDDRVRKLVQEKLRQLGQEPKKAFADEANHPYFTTADGRLVPIHKARIRKTVATITVGPPQCPRHVAPGLNHHIEILAVRDPAGAVTHWEGELVSLFEAARRVKAGEPVVRRNHGPNKDFLFSLAKGEYVEMELQPGKRQLFRVTVISAKQIEFRLHHDARPTMLLRKTPGARVIRSPGSLFKAKARKVAVDPLGNVFPAND

SEQ ID NO: 76 - protein, 1003 aa, synthetic construct
MEITINREIGKLGLPRHLVLGMAPGIASCGFALIDTANHEILDLGVRLFDSPTHPKTGQSLAVIRRGFRSTRRNIDRTQARLKHCLQVLKAYGLIPQDATKEYFHTTKGDKQPLKLRVDGLDRLLNDREWALVLYSLCKRRGYIPHGEGNQDKSSEGGKVLSALAANKEAIAETSCRTVGEWLAQQPQSRNRGGNYDKYVTHAQLIEETHILFDAQRSFGSKYASPEFEAAYIEVCDWERSRKDFDRRTYDLVGHCSYFPTEKRAARCTLTSELVSAYGALGNITIIHENGTSRALSATERDECIAILFSCEPIRGNKDCAVKFGALRKALDLSSGDYFKGVPAADEKTREVYKPKGWRVLRNTLNAANPILLQRLRDDRDLADAVMEAVAYSSALPVLQEQLQGLPLSEAEIEALCRLPYSSKALNGYGNRSKKALDMLLDCLEEPEVLNLTQAENDCGLLGLRIAGAQLERSDRLMPYETWIERTGRTNNNPVVIRSMSQMRKVVNAICRKWGVPNEIHVELDRELRLPQRAKDEIAKANKKNEKNRERIAGQIAELRGCTADEVTGKQIEKYRLWEEQEYFDLYTGAKIEVDRLISDDTYTQIDHILPFSRTGENSRNNKVLVLAKSNQDKREQTPYEWMSHDGAPSWDAFERRVQENQKLSRRKKNFLLEKDLDTKEGEFLARSFTDTAYMSREVCAYLADCLLFPDDGAKAHVVPTTGRATAWLRRRWGLNFGSNGEKDRSDDRHHATDACVIAACSPSLVIKTARINQETHWSITRGMNETQRRDAIMKALESVMPWETFANEVRAAHDFVVPTRFVPRKGKGELFEQTVYRYAGVNAQGKDIARKASSDKDIVMGNAVVSADEKSVIKVSEMLCLRLWHDPEAKKGQGAWYADPVYKADIPALKDGTYVPRIAKAHTGRKAWKPVPESAMAKPPLEIYFGDLVQIGDFIGRFSGYNINNANWSFTDRLTRLNLSCPTVGQLNNDLSPVVIRESPIK

SEQ ID NO: 77 - protein, 1082 aa, synthetic construct
MNYVLGLAVGIASVGWAVLELNEEDNPIRIEGLGARIFDKAEVPKTGASLAAPRRMSRGIRRVIRRRRFRLQRVRSYLKKHNILPAEKVDHLYDVPSAIDIYELRKRALTEKVTAEEWARLLIFFAKHRGFKSNRKKASGDADEGEMLKAIAANAEILKNYRTVGEMLCDNEKFRKRKRNRDGAYNFTVSRAMLMEEIHTLFEIQRNLGQKFADEKLEEEYVILFAAQRKFDEGPGENSPYAGNQIEKMIGSCTLEGKKEKRAPKASYAFMAFNLWQKINHLKVNRRGSERFLTEEERRRIADLAWKKEKLTYGSLRKVLSLDPEDRFVGLRYDLKKGKAENLEEPVSEAEKRSFSWVKDYHSIRKALDKVEKNRILKLSHEQLDTIATAFSVYKNEETIEKYLEEGGIGKADGEALLERLSGFSKFGHLSLKACYKLLPFLEKGEVYSRACELAGYDFSKSSLENIDDIPNPVVKRSISQTLKVINAIILRYGNPVEVHIELARELARSFRDRKKMEKGMQENQAKNEKIRQRLISEFGVLRPKGMDIVKFKLCEEQNGECAYSQKHFDMEKLLKDPSYAEVDHIIPYSRSFDDSYNNKVLVLTKENREKRNRIPMEYLADAPERKNRFIHWVKSTIRNSRKRENLLRTDYTATTENEWKRRNLQDTQYISKYLYNYLRHHLVLAKGYTERKRRIIPVNGAVTAYFRKRLGINKIRENGDLHHAVDAVIIACATQGIVNKVSRYSKSRELWDYEVDMETGEVLQKKNKNTKDVFPEPWLNFRYELEQKVRVRPLDIPETADITEMEEPFVSHMPNRKIHGPAHKETIRSGRLKEEGYTISKTALIDLKLTEDKEEIKGYYNKESDRLLYEALKKQLQRYGGKAKEAFKEPFHKPKADGTPGPIVNKVKIMEKSTMLIPVNGGKGLASNGNMVRIDVFRAEEKGKKKYYFIPVYVADTVKEELPNRAVLAHKPYEAWKIMKEENFIFSLYPNDLIFVDAGKEIPFKAALKGSTLDPEKKASRFLMYYKGADIATGSISGVNHDETYKARGVGIQSLREIKKCCIDVLGNISFASKEKRQTFR

SEQ ID NO: 78 - protein, 1348 aa, synthetic construct
MDQSKEYYIGLAGGTDSVGWAVLNPDYTVVKKRGKSLWGVRLFESGQTAAERRLARSARRRTDRKKWRLKLLKELFAEEVAACDPAFFARLAESRYWEDDKKVDGADTLFHDADFTDKDYHRQFPTIYHLRRHLMCCTEKPDIRLLYLAVAHMIKNRGHFLNEGQDLNQVRRFDDVWQNLCAAVSDVLGIELAVENGAKAAEVLTSSVKIKEKTKQLESVLGEGESEADRSVCKALAGLLAGAKVSAVDLFNGDEALKECGKFSLAEKSIEELEPDLGDALGEERFSLLQYAYAAYNWAVFARLLPEGKTISEVKTEEYEAYKADLRALKQLVKQYASDQYYRVFRSAKIKGNYASYVGKTNCGNEKSNPESCKPEEFFAFLKKELKPLWSQNIPAAASLAAKLESGTLLRRQRSGENAAIPYQAHLQELQIILKNMQQFYPFLQKADENGFTPAYKIEKLLTFRIPYYVGPLNDAHKEKGFCWIVKKADVPVLPWNFDQVVDENACEDAFIGRMSATCTYLVGENVLPQNSPLYCRFMVLNELNNLRIRSEKITPALKQAIFTQLFCAGKGGKVTQKKLLDFLHSQGIDANKQDISGIDGDFKASMAPAVKLQSIFTEPLPPEILERLAFALTVSGESHKMLQNRIRAILPNADNAVIRKVCALKFTGWGRLSQKLLTEIYDVDQTTGECRSLMDLLWSTNNNLMQLLSGDFTFAAGIDAYNAAQNGTENIFDYDHLVKDLYVSPSVKRGLWQTLLLVKEVRKIMGCDPARVFIEMARGVSPEQKNKRTVSRKDQLLALYKACKEDARDWCGELEALPEDKLRSDKLYLYYTQMGRCMYSGEPIRLDDLMHDTANQLYDIDHIYPQSKTKDDSLTNRVLVKRQLNAIKSNDYPLPQTMRQTALWKALLEKGLISKQKYLRLTRTTPFTEEELAGFINRQLVETRQSTKAAAHLLEQLLPNTEVVYVKAGLAADFRQEFGFVKCRDANDFHHAKDAYLNAVVGNVYHEKFTKNPLRFVRSGQEYSLNLSALFQNWNIYKGGRVIWQKGEDGSLETVRARMAKNDPMVTRYCTEGRGALYDLQPMKKSKGQLPLKSSDERLQHIDRYGGYNKLAGAYFTLAAYYKKGKRVKSIESVPLYLAAKLQRDPAALQQYLADQLGTDRVEILVPEIKLGTLFKWNGYPMTLSGRTGPQLLFRNAAELRTNAEQEQYIKKMSRYLEKCKGRKEPLPIRPAYDKLTPEENLQLYDAFTQWLTSGIYAKRLSLQGKFLLEKRDAFAALSPEAQVRQLMEILHLFQCNPVAANLSELGGAAHAGILLASKNIDGKVPVSIVHQSVTGYFTQEVCLNDL

SEQ ID NO: 79 - DNA, 37 bp, synthetic construct
  source 1..37: mol_type = other DNA
ccgtgagccaccacgtcgcaagcctcgaccaggaagg

SEQ ID NO: 80 - DNA, 38 bp, synthetic construct
  source 1..38: mol_type = other DNA
tccgtgagccaccacgtcgcaagcctcgactagaacgg

SEQ ID NO: 81 - DNA, 32 bp, synthetic construct
  source 1..32: mol_type = other DNA
agccaccacgtcgcaagcctcgacgtgggtta

SEQ ID NO: 82 - DNA, 31 bp, synthetic construct
  source 1..31: mol_type = other DNA
agccaccacgtcgcaagcctcgacgtgttac

SEQ ID NO: 83 - DNA, 32 bp, synthetic construct; identical to SEQ ID NO: 81
  source 1..32: mol_type = other DNA

SEQ ID NO: 84 - DNA, 29 bp, synthetic construct
  source 1..29: mol_type = other DNA
agccaccacgtcgcaagcctcgacggcca

SEQ ID NO: 85 - DNA, 40 bp, synthetic construct
  source 1..40: mol_type = other DNA
tccgtgagccaccacgtcgcaagcctcgacggcggggacg

SEQ ID NO: 86 - DNA, 37 bp, synthetic construct
  source 1..37: mol_type = other DNA
ccgtgagccaccacgtcgcaagcctcgactggacctg

SEQ ID NO: 87 - DNA, 32 bp, synthetic construct
  source 1..32: mol_type = other DNA
agccaccacgtcgcaagcctcgaccgtaattg

SEQ ID NO: 88 - DNA, 121 bp, synthetic construct
  source 1..121: mol_type = other DNA
ccaccacgtcgcaagcctcgacgttttgatttactcgaaagagtccaatcataattgaccggagaataattgattcctctacaatgtacgaataaattcattctctaaaccttaaaaattt

SEQ ID NO: 89 - DNA, 99 bp, synthetic construct
  source 1..99: mol_type = other DNA
ccaccacgtcgcaagcctcgacgttttgacttgaaaaagtcttaactgattttgccgaatttcaagctctgcattgcaccttggcattcggcatatttt

SEQ ID NO: 90 - DNA, 110 bp, synthetic construct
  source 1..110: mol_type = other DNA
ccaccacgtcgcaagcctcgacgttgagaatcgaaagattcttaataaggcatccttccgatgctgacttctcaccgtccgttttccaataggagcgggcggtatgtttt

SEQ ID NO: 91 - DNA, 113 bp, synthetic construct
  source 1..113: mol_type = other DNA
ccaccacgtcgcaagcctcgacgttgggaaccgaaaggttcccaataaggcgcatcttggcgctgacttctcaccgtcctcttgctgcttagcagagggcggtatgttttttt

SEQ ID NO: 92 - DNA, 118 bp, synthetic construct
  source 1..118: mol_type = other DNA
ccaccacgtcgcaagcctcgacgttgagaatctttcgaaagaaagattcttaataaggcatccttccgatgctgacttctcaccgtccggctcctcttaggaacgggcggtatgtttt

SEQ ID NO: 93 - DNA, 124 bp, synthetic construct
  source 1..124: mol_type = other DNA
ccaccacgtcgcaagcctcgacgctgtggcttgcgggggaaaccccttgtcacagtaagggactttcgttcgcgaaaggcaacctcgccagcatcgctgggcgaggaccagggcaaggcgattt

SEQ ID NO: 94 - DNA, 118 bp, synthetic construct
  source 1..118: mol_type = other DNA
ccaccacgtcgcaagcctcgacgtcttgagcgaaagctccagacaaggggagccacttaagtggcttacccgtaaagtaacccccgttcaatcttcggattgggcggggcgaactttt

SEQ ID NO: 95 - DNA, 118 bp, synthetic construct
  source 1..118: mol_type = other DNA
ccaccacgtcgcaagcctcgacgttgtaattccctagaaataggttattacaataaggtccaacaggagtgttggtaccgtaaagctctaacggcacccacgggtgccgttatctttt

SEQ ID NO: 96 - DNA, 101 bp, synthetic construct
  source 1..101: mol_type = other DNA
ccaccacgtcgcaagcctcgacgtttgagagtagtgaaaactacgagttcaaatacaattttttcaaattgccctatagggccctcacagtgtgagatttt

SEQ ID NO: 97 - DNA, 22 bp, synthetic construct
  source 1..22: mol_type = other DNA
cgtttgccgtctgaatttgacc

SEQ ID NO: 98 - DNA, 22 bp, synthetic construct
  source 1..22: mol_type = other DNA
gaagatcaggatatgtggcgga

SEQ ID NO: 99 - DNA, 22 bp, synthetic construct
  source 1..22: mol_type = other DNA
acgggtaacagtttctttatgg

SEQ ID NO: 100 - DNA, 22 bp, synthetic construct
  source 1..22: mol_type = other DNA
cgttgctgcataaaccgactac

SEQ ID NO: 101 - DNA, 22 bp, synthetic construct
  source 1..22: mol_type = other DNA
aaaacccgaaactgtggagcgc

SEQ ID NO: 102 - DNA, 22 bp, synthetic construct
  source 1..22: mol_type = other DNA
gattgaaaatggtctgctgctg

SEQ ID NO: 103 - DNA, 22 bp, synthetic construct
  source 1..22: mol_type = other DNA
tacgggtaacagtttctttatg

SEQ ID NO: 104 - DNA, 22 bp, synthetic construct
  source 1..22: mol_type = other DNA
gcgttggcaatttaaccgccag

SEQ ID NO: 105 - DNA, 22 bp, synthetic construct
  source 1..22: mol_type = other DNA
ctgaatatcgacggtttccata

SEQ ID NO: 106 - DNA, 22 bp, synthetic construct
  source 1..22: mol_type = other DNA
cacatttaatgttgatgaaagc

SEQ ID NO: 107 - DNA, 22 bp, synthetic construct
  source 1..22: mol_type = other DNA
acacaaatcagcgatttccatg

SEQ ID NO: 108 - DNA, 22 bp, synthetic construct
  source 1..22: mol_type = other DNA
atggatgagcagacgatggtgc

SEQ ID NO: 109 - DNA, 22 bp, synthetic construct
  source 1..22: mol_type = other DNA
ttcatctgtggtgcaacgggcg

SEQ ID NO: 110 - DNA, 22 bp, synthetic construct
  source 1..22: mol_type = other DNA
acgagcatcatcctctgcatgg

SEQ ID NO: 111 - DNA, 22 bp, synthetic construct
  source 1..22: mol_type = other DNA
cgacccgcattgaccctaacgc

SEQ ID NO: 112 - DNA, 22 bp, synthetic construct
  source 1..22: mol_type = other DNA
cacaaatcagcgatttccatgt

SEQ ID NO: 113 - DNA, 22 bp, synthetic construct
  source 1..22: mol_type = other DNA
tgatgaagcagaacaactttaa

SEQ ID NO: 114 - DNA, 22 bp, synthetic construct
  source 1..22: mol_type = other DNA
aatattgaaacccacggcatgg

SEQ ID NO: 115 - DNA, 22 bp, synthetic construct
  source 1..22: mol_type = other DNA
tcaaaaaatggctttcgctacc

SEQ ID NO: 116 - DNA, 22 bp, synthetic construct
  source 1..22: mol_type = other DNA
aagcagcgttgttgcagtgcac

SEQ ID NO: 117 - DNA, 22 bp, synthetic construct
  source 1..22: mol_type = other DNA
tcagccggaaaacctaccggat

SEQ ID NO: 118 - DNA, 22 bp, synthetic construct
  source 1..22: mol_type = other DNA
gaagatcaggatatgtggcgga

SEQ ID NO: 119 - DNA, 22 bp, synthetic construct
  source 1..22: mol_type = other DNA
aacgtcgaaaacccgaaactgt

SEQ ID NO: 120 - DNA, 22 bp, synthetic construct
  source 1..22: mol_type = other DNA
aaacccacggcatggtgccaat

SEQ ID NO: 121 - DNA, 22 bp, synthetic construct
  source 1..22: mol_type = other DNA
aaaacccgaaactgtggagcgc

SEQ ID NO: 122 - DNA, 22 bp, synthetic construct
  source 1..22: mol_type = other DNA
ggcaactctggctcacagtacg

SEQ ID NO: 123 - DNA, 22 bp, synthetic construct
  source 1..22: mol_type = other DNA
ccggaaaacctaccggattgat

SEQ ID NO: 124 - DNA, 20 bp, synthetic construct
  source 1..20: mol_type = other DNA
tttctttcacagatgtggat

SEQ ID NO: 125 - DNA, 20 bp, synthetic construct
  source 1..20: mol_type = other DNA
caggatatgtggcggatgag

SEQ ID NO: 126 - DNA, 20 bp, synthetic construct
  source 1..20: mol_type = other DNA
tgcgaatacgcccacgcgat

SEQ ID NO: 127 - DNA, 22 bp, synthetic construct
  source 1..22: mol_type = other DNA
cggcgtttcatctgtggtgcaa

SEQ ID NO: 128 - DNA, 22 bp, synthetic construct
  source 1..22: mol_type = other DNA
gccaggacagtcgtttgccgtc

SEQ ID NO: 129 - DNA, 22 bp, synthetic construct
  source 1..22: mol_type = other DNA
tcagccgcgctgtactggaggc

SEQ ID NO: 130 - DNA, 22 bp, synthetic construct
  source 1..22: mol_type = other DNA
cccttcccaacagttgcgcagc

SEQ ID NO: 131 - DNA, 22 bp, synthetic construct
  source 1..22: mol_type = other DNA
ctgtcgtcgtcccctcaaactg

SEQ ID NO: 132 - DNA, 22 bp, synthetic construct
  source 1..22: mol_type = other DNA
ctacgtctgaacgtcgaaaacc

SEQ ID NO: 133 - DNA, 22 bp, synthetic construct
  source 1..22: mol_type = other DNA
gtgacggcagttatctggaaga

SEQ ID NO: 134 - DNA, 22 bp, synthetic construct
  source 1..22: mol_type = other DNA
atgatttcagccgcgctgtact

SEQ ID NO: 135 - DNA, 22 bp, synthetic construct
  source 1..22: mol_type = other DNA
ttactgccgcctgttttgaccg

SEQ ID NO: 136 - DNA, 22 bp, synthetic construct
  source 1..22: mol_type = other DNA
cgaatggcgctttgcctggttt

SEQ ID NO: 137 - DNA, 22 bp, synthetic construct
  source 1..22: mol_type = other DNA
tcccctcaaactggcagatgca

SEQ ID NO: 138 - DNA, 22 bp, synthetic construct
  source 1..22: mol_type = other DNA
atctacaccaacgtgacctatc

SEQ ID NO: 139 - DNA, 22 bp, synthetic construct
  source 1..22: mol_type = other DNA
ttcatctgtggtgcaacgggcg

SEQ ID NO: 140 - DNA, 22 bp, synthetic construct
  source 1..22: mol_type = other DNA
acgagcatcatcctctgcatgg

SEQ ID NO: 141 - DNA, 22 bp, synthetic construct
  source 1..22: mol_type = other DNA
cgacccgcattgaccctaacgc

SEQ ID NO: 142 - DNA, 22 bp, synthetic construct
  source 1..22: mol_type = other DNA
caacgggcgctgggtcggttac

SEQ ID NO: 143 - DNA, 22 bp, synthetic construct
  source 1..22: mol_type = other DNA
cacaaatcagcgatttccatgt

SEQ ID NO: 144 - DNA, 22 bp, synthetic construct
  source 1..22: mol_type = other DNA
aaggcggcggagccgacaccac

SEQ ID NO: 145 - DNA, 22 bp, synthetic construct
  source 1..22: mol_type = other DNA
cggtcaatccgccgtttgttcc

SEQ ID NO: 146 - DNA, 22 bp, synthetic construct
  source 1..22: mol_type = other DNA
tcctttgcgaatacgcccacgc

SEQ ID NO: 147 - DNA, 22 bp, synthetic construct
  source 1..22: mol_type = other DNA
ggtcggcttacggcggtgattt

SEQ ID NO: 148 - DNA, 22 bp, synthetic construct
  source 1..22: mol_type = other DNA
gccgatcgcgtcacactacgtc

SEQ ID NO: 149 - DNA, 22 bp, synthetic construct
  source 1..22: mol_type = other DNA
gatccgcgctggctaccggcga

SEQ ID NO: 150 - DNA, 22 bp, synthetic construct
  source 1..22: mol_type = other DNA
ccttcccgcccggtgcagtatg

SEQ ID NO: 151 - DNA, 22 bp, synthetic construct
  source 1..22: mol_type = other DNA
tcagccgcgctgtactggaggc

SEQ ID NO: 152 - DNA, 22 bp, synthetic construct
  source 1..22: mol_type = other DNA
gaccagcccttcccggctgtgc

SEQ ID NO: 153 - DNA, 22 bp, synthetic construct
  source 1..22: mol_type = other DNA
tccgtttatccgggcaaaccat

SEQ ID NO: 154 - DNA, 20 bp, synthetic construct
  source 1..20: mol_type = other DNA
cctctggatgtcgctccaca

SEQ ID NO: 155 - DNA, 20 bp, synthetic construct
  source 1..20: mol_type = other DNA
gggacgcgcgaattgaatta

SEQ ID NO: 156 - DNA, 20 bp, synthetic construct
  source 1..20: mol_type = other DNA
cgttttacaacgtcgtgact

SEQ ID NO: 157 - DNA, 40 bp, synthetic construct
  source 1..40: mol_type = other DNA
tgaaaaagaaagttttcgcatttgcgcttggtaaagcaag

SEQ ID NO: 158 - DNA, 27 bp, synthetic construct
  source 1..27: mol_type = other DNA
tggtatatctccttcttaaagttaaac

SEQ ID NO: 159 - DNA, 35 bp, synthetic construct
  source 1..35: mol_type = other DNA
accatgtttggggctttgcgattggcaaagggtct

SEQ ID NO: 160 - DNA, 25 bp, synthetic construct
  source 1..25: mol_type = other DNA
tgttcttttctttctccatggtata

SEQ ID NO: 161 - DNA, 35 bp, synthetic construct
  source 1..35: mol_type = other DNA
attatcgcattggcgtggcggtcggggatcgcagc

SEQ ID NO: 162 - DNA, 21 bp, synthetic construct
  source 1..21: mol_type = other DNA
tcttcatatcggttgacatgg

SEQ ID NO: 163 - DNA, 35 bp, synthetic construct
  source 1..35: mol_type = other DNA
agtaccgcattggcatcgcggtgggcgatcgctcg

SEQ ID NO: 164 - DNA, 22 bp, synthetic construct
  source 1..22: mol_type = other DNA
tagtatgttcgctcatggtata

SEQ ID NO: 165 - DNA, 35 bp, synthetic construct
  source 1..35: mol_type = other DNA
attaccgcattggcgtggcggtaggtgatcgtagt

SEQ ID NO: 166 - DNA, 21 bp, synthetic construct
  source 1..21: mol_type = other DNA
tcttcatatcagtgctcatgg

SEQ ID NO: 167 - DNA, 35 bp, synthetic construct
  source 1..35: mol_type = other DNA
gctactgcttgggcctggcggtaggtgtgcaagga

SEQ ID NO: 168 - DNA, 18 bp, synthetic construct
  source 1..18: mol_type = other DNA
tggtcgcctgcagggtct

SEQ ID NO: 169 - DNA, 35 bp, synthetic construct
  source 1..35: mol_type = other DNA
acctggttctgggtatggcgccgggcatcgcctca

SEQ ID NO: 170 - DNA, 18 bp, synthetic construct
  source 1..18: mol_type = other DNA
ggcgaggcaagcctaatt

SEQ ID NO: 171 - DNA, 35 bp, synthetic construct
  source 1..35: mol_type = other DNA
actatgtgctcggcctggcggtcggtattgcttca

SEQ ID NO: 172 - DNA, 25 bp, synthetic construct
  source 1..25: mol_type = other DNA
tcatggtatatctccttcttaaagt

SEQ ID NO: 173 - DNA, 40 bp, synthetic construct
  source 1..40: mol_type = other DNA
taaagagtactacattggtctggcgggtggtacggactcg

SEQ ID NO: 174 - DNA, 21 bp, synthetic construct
  source 1..21: mol_type = other DNA
ctctggtccatggtatatctc

SEQ ID NO: 175 - DNA, 42 bp, synthetic construct
  source 1..42: mol_type = other DNA
gataagaaatactcaataggactggcgattggcacaaatagc

SEQ ID NO: 176 - DNA, 25 bp, synthetic construct
  source 1..25: mol_type = other DNA
catggtatatctccttcttaaagtt

SEQ ID NO: 177 - DNA, 21 bp, synthetic construct
  source 1..21: mol_type = other DNA
ccaggctttacactttatgct

SEQ ID NO: 178 - DNA, 19 bp, synthetic construct
  source 1..19: mol_type = other DNA
gtatgtggtggatgaagcc

SEQ ID NO: 179 - DNA, 18 bp, synthetic construct
  source 1..18: mol_type = other DNA
agcttccagggggaaacg

SEQ ID NO: 180 - DNA, 26 bp, synthetic construct
  source 1..26: mol_type = other DNA
attaacctataaaaataggcgtatca

SEQ ID NO: 181 - DNA, 60 bp, synthetic construct
  source 1..60: mol_type = other DNA
gatataccatgggcagcagtcatcatcatcaccatcactccgaggttgaatttagtcatg

SEQ ID NO: 182 - DNA, 60 bp, synthetic construct
  source 1..60: mol_type = other DNA
agactttcctcttcttcttgggagacccgccagagcctcgaggacccaccagagctgcct

SEQ ID NO: 183 - DNA, 55 bp, synthetic construct
  source 1..55: mol_type = other DNA
tctggcgggtctcccaagaagaagaggaaagtctaagatccggctgctaacaaag

SEQ ID NO: 184 - DNA, 45 bp, synthetic construct
  source 1..45: mol_type = other DNA
ctccttgcatgctctagaattaattaaaccattccttgcggcggc

SEQ ID NO: 185 - DNA, 48 bp, synthetic construct
  source 1..48: mol_type = other DNA
aggaatggtttaattaattctagagcatgcaaggagatggcgcccaac

SEQ ID NO: 186 - DNA, 56 bp, synthetic construct
  source 1..56: mol_type = other DNA
gtgatggtgatgatgatgactgctgcccatggtatatctccttcttaaagttaaac

SEQ ID NO: 187 - DNA, 60 bp, synthetic construct
  source 1..60: mol_type = other DNA
aggagatataccatgggcagcagtcatcatcatcaccatcacatgtcgtctgagaccggg

SEQ ID NO: 188 - DNA, 60 bp, synthetic construct
  source 1..60: mol_type = other DNA
taatatctgaaagattggtagaaccaccagacccgcggcagattcaggtgtcgcactttc

SEQ ID NO: 189 - DNA, 44 bp, synthetic construct
  source 1..44: mol_type = other DNA
cgacacctgaatctgccgcgggtctggtggttctaccaatcttt

SEQ ID NO: 190 - DNA, 60 bp, synthetic construct
  source 1..60: mol_type = other DNA
ttagactttcctcttcttcttgggagaaccaccagaaagcattttgatcttgttttcgcc

SEQ ID NO: 191 - DNA, 54 bp, synthetic construct
  source 1..54: mol_type = other DNA
ctggtggttctcccaagaagaagaggaaagtctaagatccggctgctaacaaag

SEQ ID NO: 192 - DNA, 45 bp, synthetic construct
  source 1..45: mol_type = other DNA
ctccttgcatgctctagaattaattaaccattccttgcggcggcg

SEQ ID NO: 193 - DNA, 48 bp, synthetic construct
  source 1..48: mol_type = other DNA
aggaatggttaattaattctagagcatgcaaggagatggcgcccaaca

SEQ ID NO: 194 - DNA, 50 bp, synthetic construct
  source 1..50: mol_type = other DNA
gtgatgatgatgactgctgcccatggtatatctccttcttaaagttaaac

SEQ ID NO: 195 - DNA, 55 bp, synthetic construct
  source 1..55: mol_type = other DNA
aaagtagtggaggcagctctggtgggtccatgaaaaagaaagttttcgcatttgc

SEQ ID NO: 196 - DNA, 55 bp, synthetic construct
  source 1..55: mol_type = other DNA
ctcttcttcttgggagacccgccagagcctttgctttcgacttttttaaattcgg

SEQ ID NO: 197 - DNA, 54 bp, synthetic construct
  source 1..54: mol_type = other DNA
gaaagtagtggaggcagctctggtgggtccatggagaaagaaaagaacaaccat

SEQ ID NO: 198 - DNA, 50 bp, synthetic construct
  source 1..50: mol_type = other DNA
cctcttcttcttgggagacccgccagagcccagttcacttaactcgacgc

SEQ ID NO: 199 - DNA, 55 bp, synthetic construct
  source 1..55: mol_type = other DNA
gaaagtagtggaggcagctctggtgggtccatgtcaaccgatatgaagaattatc

SEQ ID NO: 200 - DNA, 48 bp, synthetic construct
  source 1..48: mol_type = other DNA
cctcttcttcttgggagacccgccagagcccccctctactccaagcgc

SEQ ID NO: 201 - DNA, 52 bp, synthetic construct
  source 1..52: mol_type = other DNA
gaaagtagtggaggcagctctggtgggtccatgagcgaacatactaagtacc

SEQ ID NO: 202 - DNA, 50 bp, synthetic construct
  source 1..50: mol_type = other DNA
cctcttcttcttgggagacccgccagagccttcttgttcatcaagggctg

SEQ ID NO: 203 - DNA, 54 bp, synthetic construct
  source 1..54: mol_type = other DNA
gaaagtagtggaggcagctctggtgggtccatgagcactgatatgaagaattac

SEQ ID NO: 204 - DNA, 48 bp, synthetic construct
  source 1..48: mol_type = other DNA
cctcttcttcttgggagacccgccagagccaccctcgacgcctaacgc

SEQ ID NO: 205 - DNA, 48 bp, synthetic construct
  source 1..48: mol_type = other DNA
gaaagtagtggaggcagctctggtgggtccatgggagatcagcagacc

SEQ ID NO: 206 - DNA, 48 bp, synthetic construct
  source 1..48: mol_type = other DNA
cctcttcttcttgggagacccgccagagccatcgttcgcgggaaacac

SEQ ID NO: 207 - DNA, 55 bp, synthetic construct
  source 1..55: mol_type = other DNA
gaaagtagtggaggcagctctggtgggtccatggaaattacaattaaccgtgaga

SEQ ID NO: 208 - DNA, 48 bp, synthetic construct
  source 1..48: mol_type = other DNA
cctcttcttcttgggagacccgccagagcccttaatcgggctctcacg

SEQ ID NO: 209 - DNA, 49 bp, synthetic construct
  source 1..49: mol_type = other DNA
gaaagtagtggaggcagctctggtgggtccatgaactatgtgctcggcc

SEQ ID NO: 210 - DNA, 48 bp, synthetic construct
  source 1..48: mol_type = other DNA
cctcttcttcttgggagacccgccagagccacggaacgtttggcgctt

SEQ ID NO: 211 - DNA, 52 bp, synthetic construct
  source 1..52: mol_type = other DNA
gaaagtagtggaggcagctctggtgggtccatggaccagagtaaagagtact

SEQ ID NO: 212 - DNA, 54 bp, synthetic construct
  source 1..54: mol_type = other DNA
cctcttcttcttgggagacccgccagagcccagatcatttaaacacacctcttg

SEQ ID NO: 213 - DNA, 55 bp, synthetic construct
  source 1..55: mol_type = other DNA
gaaagtagtggaggcagctctggtgggtccatggataagaaatactcaataggac

SEQ ID NO: 214 - DNA, 48 bp, synthetic construct
  source 1..48: mol_type = other DNA
cctcttcttcttgggagacccgccagagccgtcacctcccagctgact

SEQ ID NO: 215 - DNA, 56 bp, synthetic construct
  source 1..56: mol_type = other DNA
acatccgaaagtgcgacacctgaatctgccatgaaaaagaaagttttcgcatttgc

SEQ ID NO: 216 - DNA, 56 bp, synthetic construct
  source 1..56: mol_type = other DNA
atctgaaagattggtagaaccaccagaccctttgctttcgacttttttaaattcgg

SEQ ID NO: 217 - DNA, 54 bp, synthetic construct
  source 1..54: mol_type = other DNA
acatccgaaagtgcgacacctgaatctgccatggagaaagaaaagaacaaccat

SEQ ID NO: 218 - DNA, 50 bp, synthetic construct
  source 1..50: mol_type = other DNA
atctgaaagattggtagaaccaccagaccccagttcacttaactcgacgc

SEQ ID NO: 219 - DNA, 54 bp, synthetic construct
  source 1..54: mol_type = other DNA
catccgaaagtgcgacacctgaatctgccatgtcaaccgatatgaagaattatc

SEQ ID NO: 220 - DNA, 48 bp, synthetic construct
  source 1..48: mol_type = other DNA
atctgaaagattggtagaaccaccagaccccccctctactccaagcgc

SEQ ID NO: 221 - DNA, 52 bp, synthetic construct
  source 1..52: mol_type = other DNA
acatccgaaagtgcgacacctgaatctgccatgagcgaacatactaagtacc

SEQ ID NO: 222 - DNA, 50 bp, synthetic construct
  source 1..50: mol_type = other DNA
atctgaaagattggtagaaccaccagacccttcttgttcatcaagggctg

SEQ ID NO: 223 - DNA, 54 bp, synthetic construct
  source 1..54: mol_type = other DNA
acatccgaaagtgcgacacctgaatctgccatgagcactgatatgaagaattac

SEQ ID NO: 224 - DNA, 48 bp, synthetic construct
  source 1..48: mol_type = other DNA
atctgaaagattggtagaaccaccagacccaccctcgacgcctaacgc

SEQ ID NO: 225 - DNA, 48 bp, synthetic construct
  source 1..48: mol_type = other DNA
acatccgaaagtgcgacacctgaatctgccatgggagatcagcagacc

SEQ ID NO: 226 - DNA, 48 bp, synthetic construct
  source 1..48: mol_type = other DNA
atctgaaagattggtagaaccaccagacccatcgttcgcgggaaacac

SEQ ID NO: 227 - DNA, 54 bp, synthetic construct
  source 1..54: mol_type = other DNA
acatccgaaagtgcgacacctgaatctgccatggaaattacaattaaccgtgag

SEQ ID NO: 228 - DNA, 49 bp, synthetic construct
  source 1..49: mol_type = other DNA
atctgaaagattggtagaaccaccagaccccttaatcgggctctcacga

SEQ ID NO: 229 - DNA, 49 bp, synthetic construct
  source 1..49: mol_type = other DNA
acatccgaaagtgcgacacctgaatctgccatgaactatgtgctcggcc

SEQ ID NO: 230 - DNA, 48 bp, synthetic construct
  source 1..48: mol_type = other DNA
atctgaaagattggtagaaccaccagacccacggaacgtttggcgctt

SEQ ID NO: 231 - DNA, 49 bp, synthetic construct
  source 1..49: mol_type = other DNA
atccgaaagtgcgacacctgaatctgccatggaccagagtaaagagtac

SEQ ID NO: 232 - DNA, 55 bp, synthetic construct
  source 1..55: mol_type = other DNA
tatctgaaagattggtagaaccaccagaccccagatcatttaaacacacctcttg

SEQ ID NO: 233 - DNA, 55 bp, synthetic construct
  source 1..55: mol_type = other DNA
acatccgaaagtgcgacacctgaatctgccatggataagaaatactcaataggac

SEQ ID NO: 234 - DNA, 48 bp, synthetic construct
  source 1..48: mol_type = other DNA
atctgaaagattggtagaaccaccagacccgtcacctcccagctgact

SEQ ID NO: 235 - DNA, 44 bp, synthetic construct
  source 1..44: mol_type = other DNA
ggtcaaattcagacggcaaacgctatagtgagtcgtattaaggt

SEQ ID NO: 236 - DNA, 50 bp, synthetic construct
  source 1..50: mol_type = other DNA
tatagcgtttgccgtctgaatttgaccgttttgatttactcgaaagagtc

SEQ ID NO: 237 - DNA, 50 bp, synthetic construct
  source 1..50: mol_type = other DNA
caaaactccgccacatatcctgatcttcctatagtgagtcgtattaaggt

SEQ ID NO: 238 - DNA, 50 bp, synthetic construct
  source 1..50: mol_type = other DNA
tataggaagatcaggatatgtggcggagttttgatttactcgaaagagtc

SEQ ID NO: 239 - DNA, 50 bp, synthetic construct
  source 1..50: mol_type = other DNA
caaaacccataaagaaactgttacccgtctatagtgagtcgtattaaggt

SEQ ID NO: 240 - DNA, 50 bp, synthetic construct
  source 1..50: mol_type = other DNA
tatagacgggtaacagtttctttatgggttttgatttactcgaaagagtc

SEQ ID NO: 241 - DNA, 50 bp, synthetic construct
  source 1..50: mol_type = other DNA
caaaacgtagtcggtttatgcagcaacgctatagtgagtcgtattaaggt

SEQ ID NO: 242 - DNA, 50 bp, synthetic construct
  source 1..50: mol_type = other DNA
tagcgttgctgcataaaccgactacgttttgacttgaaaaagtcttaact

SEQ ID NO: 243 - DNA, 50 bp, synthetic construct
  source 1..50: mol_type = other DNA
caaaacgcgctccacagtttcgggttttctatagtgagtcgtattaaggt

SEQ ID NO: 244 - DNA, 50 bp, synthetic construct
  source 1..50: mol_type = other DNA
tagaaaacccgaaactgtggagcgcgttttgacttgaaaaagtcttaact

SEQ ID NO: 245 - DNA, 50 bp, synthetic construct
  source 1..50: mol_type = other DNA
caaaaccagcagcagaccattttcaatcctatagtgagtcgtattaaggt

SEQ ID NO: 246 - DNA, 50 bp, synthetic construct
  source 1..50: mol_type = other DNA
taggattgaaaatggtctgctgctggttttgacttgaaaaagtcttaact

SEQ ID NO: 247 - DNA, 50 bp, synthetic construct
  source 1..50: mol_type = other DNA
ctcaaccataaagaaactgttacccgtactatagtgagtcgtattaaggt

SEQ ID NO: 248 - DNA, 50 bp, synthetic construct
  source 1..50: mol_type = other DNA
atagtacgggtaacagtttctttatggttgagaatcgaaagattcttaat

SEQ ID NO: 249 - DNA, 50 bp, synthetic construct
  source 1..50: mol_type = other DNA
ctcaacctggcggttaaattgccaacgcctatagtgagtcgtattaaggt

SEQ ID NO: 250 - DNA, 50 bp, synthetic construct
  source 1..50: mol_type = other DNA
taggcgttggcaatttaaccgccaggttgagaatcgaaagattcttaata

SEQ ID NO: 251 - DNA, 50 bp, synthetic construct
  source 1..50: mol_type = other DNA
ctcaactatggaaaccgtcgatattcagctatagtgagtcgtattaaggt

SEQ ID NO: 252 - DNA, 50 bp, synthetic construct
  source 1..50: mol_type = other DNA
tagctgaatatcgacggtttccatagttgagaatcgaaagattcttaata

SEQ ID NO: 253 - DNA, 50 bp, synthetic construct
  source 1..50: mol_type = other DNA
cccaacgctttcatcaacattaaatgtgctatagtgagtcgtattaaggt

SEQ ID NO: 254 - DNA, 50 bp, synthetic construct
  source 1..50: mol_type = other DNA
tcactatagcacatttaatgttgatgaaagcgttgggaaccgaaaggttc

SEQ ID NO: 255 - DNA, 50 bp, synthetic construct
  source 1..50: mol_type = other DNA
cccaaccatggaaatcgctgatttgtgtctatagtgagtcgtattaaggt

SEQ ID NO: 256 - DNA, 50 bp, synthetic construct
  source 1..50: mol_type = other DNA
tcactatagacacaaatcagcgatttccatggttgggaaccgaaaggttc

SEQ ID NO: 257 - DNA, 50 bp, synthetic construct
  source 1..50: mol_type = other DNA
cccaacgcaccatcgtctgctcatccatctatagtgagtcgtattaaggt

SEQ ID NO: 258 - DNA, 50 bp, synthetic construct
  source 1..50: mol_type = other DNA
tcactatagatggatgagcagacgatggtgcgttgggaaccgaaaggttc

SEQ ID NO: 259 - DNA, 50 bp, synthetic construct
  source 1..50: mol_type = other DNA
cacagcacatggaaatcgctgatttgtgctatagtgagtcgtattaaggt

SEQ ID NO: 260 - DNA, 48 bp, synthetic construct
  source 1..48: mol_type = other DNA
cactatagcacaaatcagcgatttccatgtgctgtggcttgcggggga

SEQ ID NO: 261 - DNA, 50 bp, synthetic construct
  source 1..50: mol_type = other DNA
cacagcttaaagttgttctgcttcatcactatagtgagtcgtattaaggt

SEQ ID NO: 262 - DNA, 48 bp, synthetic construct
  source 1..48: mol_type = other DNA
cactatagtgatgaagcagaacaactttaagctgtggcttgcggggga

SEQ ID NO: 263 - DNA, 50 bp, synthetic construct
  source 1..50: mol_type = other DNA
cacagcccatgccgtgggtttcaatattctatagtgagtcgtattaaggt

SEQ ID NO: 264 - DNA, 48 bp, synthetic construct
  source 1..48: mol_type = other DNA
cactatagaatattgaaacccacggcatgggctgtggcttgcggggga

SEQ ID NO: 265 - DNA, 50 bp, synthetic construct
  source 1..50: mol_type = other DNA
caagacggtagcgaaagccattttttgactatagtgagtcgtattaaggt

SEQ ID NO: 266 - DNA, 48 bp, synthetic construct
  source 1..48: mol_type = other DNA
cactatagtcaaaaaatggctttcgctaccgtcttgagcgaaagctcc

SEQ ID NO: 267 - DNA, 50 bp, synthetic construct
  source 1..50: mol_type = other DNA
caagacgtgcactgcaacaacgctgcttctatagtgagtcgtattaaggt

SEQ ID NO: 268 - DNA, 48 bp, synthetic construct
  source 1..48: mol_type = other DNA
cactatagaagcagcgttgttgcagtgcacgtcttgagcgaaagctcc

SEQ ID NO: 269 - DNA, 50 bp, synthetic construct
  source 1..50: mol_type = other DNA
caagacatccggtaggttttccggctgactatagtgagtcgtattaaggt

SEQ ID NO: 270 - DNA, 48 bp, synthetic construct
  source 1..48: mol_type = other DNA
cactatagtcagccggaaaacctaccggatgtcttgagcgaaagctcc

SEQ ID NO: 271 - DNA, 50 bp, synthetic construct
  source 1..50: mol_type = other DNA
tacaactccgccacatatcctgatcttcctatagtgagtcgtattaaggt

SEQ ID NO: 272 - DNA, 50 bp, synthetic construct
  source 1..50: mol_type = other DNA
tataggaagatcaggatatgtggcggagttgtaattccctagaaataggt

SEQ ID NO: 273 - DNA, 50 bp, synthetic construct
  source 1..50: mol_type = other DNA
tacaacacagtttcgggttttcgacgttctatagtgagtcgtattaaggt

SEQ ID NO: 274 - DNA, 50 bp, synthetic construct
  source 1..50: mol_type = other DNA
tatagaacgtcgaaaacccgaaactgtgttgtaattccctagaaataggt

SEQ ID NO: 275 - DNA, 50 bp, synthetic construct
  source 1..50: mol_type = other DNA
tacaacattggcaccatgccgtgggtttctatagtgagtcgtattaaggt

SEQ ID NO: 276 - DNA, 50 bp, synthetic construct
  source 1..50: mol_type = other DNA
tatagaaacccacggcatggtgccaatgttgtaattccctagaaataggt

SEQ ID NO: 277 - DNA, 50 bp, synthetic construct
  source 1..50: mol_type = other DNA
tcaaacgcgctccacagtttcgggttttctatagtgagtcgtattaaggt

SEQ ID NO: 278 - DNA, 50 bp, synthetic construct
  source 1..50: mol_type = other DNA
tatagaaaacccgaaactgtggagcgcgtttgagagtagtgaaaactacg

SEQ ID NO: 279 - DNA, 50 bp, synthetic construct
  source 1..50: mol_type = other DNA
tcaaaccgtactgtgagccagagttgccctatagtgagtcgtattaaggt

SEQ ID NO: 280 - DNA, 50 bp, synthetic construct
  source 1..50: mol_type = other DNA
tatagggcaactctggctcacagtacggtttgagagtagtgaaaactacg

SEQ ID NO: 281 - DNA, 50 bp, synthetic construct
  source 1..50: mol_type = other DNA
tcaaacatcaatccggtaggttttccggctatagtgagtcgtattaaggt

SEQ ID NO: 282 - DNA, 50 bp, synthetic construct
  source 1..50: mol_type = other DNA
tatagccggaaaacctaccggattgatgtttgagagtagtgaaaactacg

SEQ ID NO: 283 - DNA, 41 bp, synthetic construct
  source 1..41: mol_type = other DNA
atccacatctgtgaaagaaactatagtgagtcgtattagga

SEQ ID NO: 284 - DNA, 45 bp, synthetic construct
  source 1..45: mol_type = other DNA
tttctttcacagatgtggatgttttagagctagaaatagcaagtt

SEQ ID NO: 285 - DNA, 41 bp, synthetic construct
  source 1..41: mol_type = other DNA
ctcatccgccacatatcctgctatagtgagtcgtattagga

SEQ ID NO: 286 - DNA, 45 bp, synthetic construct
  source 1..45: mol_type = other DNA
caggatatgtggcggatgaggttttagagctagaaatagcaagtt

SEQ ID NO: 287 - DNA, 41 bp, synthetic construct
  source 1..41: mol_type = other DNA
atcgcgtgggcgtattcgcactatagtgagtcgtattagga

SEQ ID NO: 288 - DNA, 45 bp, synthetic construct
  source 1..45: mol_type = other DNA
tgcgaatacgcccacgcgatgttttagagctagaaatagcaagtt

SEQ ID NO: 289 - DNA, 50 bp, synthetic construct
  source 1..50: mol_type = other DNA
caaaacttgcaccacagatgaaacgccgctatagtgagtcgtattaaggt

SEQ ID NO: 290 - DNA, 50 bp, synthetic construct
  source 1..50: mol_type = other DNA
tatagcggcgtttcatctgtggtgcaagttttgatttactcgaaagagtc

SEQ ID NO: 291 - DNA, 50 bp, synthetic construct
  source 1..50: mol_type = other DNA
caaaacgacggcaaacgactgtcctggcctatagtgagtcgtattaaggt

SEQ ID NO: 292 - DNA, 50 bp, synthetic construct
  source 1..50: mol_type = other DNA
tataggccaggacagtcgtttgccgtcgttttgatttactcgaaagagtc

SEQ ID NO: 293 - DNA, 50 bp, synthetic construct
  source 1..50: mol_type = other DNA
caaaacgcctccagtacagcgcggctgactatagtgagtcgtattaaggt

SEQ ID NO: 294 - DNA, 50 bp, synthetic construct
  source 1..50: mol_type = other DNA
tatagtcagccgcgctgtactggaggcgttttgatttactcgaaagagtc

SEQ ID NO: 295 - DNA, 50 bp, synthetic construct
  source 1..50: mol_type = other DNA
caaaacgctgcgcaactgttgggaagggctatagtgagtcgtattaaggt

SEQ ID NO: 296 - DNA, 50 bp, synthetic construct
  source 1..50: mol_type = other DNA
tagcccttcccaacagttgcgcagcgttttgacttgaaaaagtcttaact

SEQ ID NO: 297 - DNA, 50 bp, synthetic construct
  source 1..50: mol_type = other DNA
caaaaccagtttgaggggacgacgacagctatagtgagtcgtattaaggt

SEQ ID NO: 298 - DNA, 50 bp, synthetic construct
  source 1..50: mol_type = other DNA
tagctgtcgtcgtcccctcaaactggttttgacttgaaaaagtcttaact

SEQ ID NO: 299 - DNA, 50 bp, synthetic construct
  source 1..50: mol_type = other DNA
caaaacggttttcgacgttcagacgtagctatagtgagtcgtattaaggt

SEQ ID NO: 300 - DNA, 50 bp, synthetic construct
  source 1..50: mol_type = other DNA
tagctacgtctgaacgtcgaaaaccgttttgacttgaaaaagtcttaact

SEQ ID NO: 301 - DNA, 50 bp, synthetic construct
  source 1..50: mol_type = other DNA
ctcaactcttccagataactgccgtcacctatagtgagtcgtattaaggt

SEQ ID NO: 302 - DNA, 50 bp, synthetic construct
  source 1..50: mol_type = other DNA
aggtgacggcagttatctggaagagttgagaatcgaaagattcttaataa

SEQ ID NO: 303 - DNA, 50 bp, synthetic construct
  source 1..50: mol_type = other DNA
tcaacagtacagcgcggctgaaatcatctatagtgagtcgtattaaggtc

SEQ ID NO: 304 - DNA, 50 bp, synthetic construct
  source 1..50: mol_type = other DNA
agatgatttcagccgcgctgtactgttgagaatcgaaagattcttaataa

SEQ ID NO: 305 - DNA, 50 bp, synthetic construct
  source 1..50: mol_type = other DNA
ctcaaccggtcaaaacaggcggcagtaactatagtgagtcgtattaaggt

SEQ ID NO: 306 - DNA, 50 bp, synthetic construct
  source 1..50: mol_type = other DNA
tagttactgccgcctgttttgaccggttgagaatcgaaagattcttaata

SEQ ID NO: 307 - DNA, 50 bp, synthetic construct
  source 1..50: mol_type = other DNA
cccaacaaaccaggcaaagcgccattcgctatagtgagtcgtattaaggt

SEQ ID NO: 308 - DNA, 49 bp, synthetic construct
  source 1..49: mol_type = other DNA
cactatagcgaatggcgctttgcctggtttgttgggaaccgaaaggttc

SEQ ID NO: 309 - DNA, 50 bp, synthetic construct
  source 1..50: mol_type = other DNA
cccaactgcatctgccagtttgaggggactatagtgagtcgtattaaggt

SEQ ID NO: 310 - DNA, 49 bp, synthetic construct
  source 1..49: mol_type = other DNA
cactatagtcccctcaaactggcagatgcagttgggaaccgaaaggttc

SEQ ID NO: 311 - DNA, 50 bp, synthetic construct
  source 1..50: mol_type = other DNA
cccaacgataggtcacgttggtgtagatctatagtgagtcgtattaaggt

SEQ ID NO: 312 - DNA, 49 bp, synthetic construct
  source 1..49: mol_type = other DNA
cactatagatctacaccaacgtgacctatcgttgggaaccgaaaggttc

SEQ ID NO: 313 - DNA, 50 bp, synthetic construct
  source 1..50: mol_type = other DNA
cacagcgtaaccgacccagcgcccgttgctatagtgagtcgtattaaggt

SEQ ID NO: 314 - DNA, 48 bp, synthetic construct
  source 1..48: mol_type = other DNA
cactatagcaacgggcgctgggtcggttacgctgtggcttgcggggga

SEQ ID NO: 315 - DNA, 50 bp, synthetic construct; identical to SEQ ID NO: 259
  source 1..50: mol_type = other DNA

SEQ ID NO: 316 - DNA, 48 bp, synthetic construct; identical to SEQ ID NO: 260
  source 1..48: mol_type = other DNA

SEQ ID NO: 317 - DNA, 50 bp, synthetic construct
  source 1..50: mol_type = other DNA
cacagcgtggtgtcggctccgccgccttctatagtgagtcgtattaaggt

SEQ ID NO: 318 - DNA, 48 bp, synthetic construct
  source 1..48: mol_type = other DNA
cactatagaaggcggcggagccgacaccacgctgtggcttgcggggga

SEQ ID NO: 319 - DNA, 50 bp, synthetic construct
  source 1..50: mol_type = other DNA
caagacggaacaaacggcggattgaccgctatagtgagtcgtattaaggt

SEQ ID NO: 320 - DNA, 48 bp, synthetic construct
  source 1..48: mol_type = other DNA
cactatagcggtcaatccgccgtttgttccgtcttgagcgaaagctcc

SEQ ID NO: 321 - DNA, 50 bp, synthetic construct
  source 1..50: mol_type = other DNA
caagacgcgtgggcgtattcgcaaaggactatagtgagtcgtattaaggt

SEQ ID NO: 322 - DNA, 48 bp, synthetic construct
  source 1..48: mol_type = other DNA
cactatagtcctttgcgaatacgcccacgcgtcttgagcgaaagctcc

SEQ ID NO: 323 - DNA, 50 bp, synthetic construct
  source 1..50: mol_type = other DNA
caagacaaatcaccgccgtaagccgaccctatagtgagtcgtattaaggt

SEQ ID NO: 324 - DNA, 48 bp, synthetic construct
  source 1..48: mol_type = other DNA
cactatagggtcggcttacggcggtgatttgtcttgagcgaaagctcc

SEQ ID NO: 325 - DNA, 50 bp, synthetic construct
  source 1..50: mol_type = other DNA
tacaacgacgtagtgtgacgcgatcggcctatagtgagtcgtattaaggt

SEQ ID NO: 326 - DNA, 50 bp, synthetic construct
  source 1..50: mol_type = other DNA
ataggccgatcgcgtcacactacgtcgttgtaattccctagaaataggtt

SEQ ID NO: 327 - DNA, 50 bp, synthetic construct
  source 1..50: mol_type = other DNA
tacaactcgccggtagccagcgcggatcctatagtgagtcgtattaaggt

SEQ ID NO: 328 - DNA, 50 bp, synthetic construct
  source 1..50: mol_type = other DNA
ataggatccgcgctggctaccggcgagttgtaattccctagaaataggtt

SEQ ID NO: 329 - DNA, 50 bp, synthetic construct
  source 1..50: mol_type = other DNA
tacaaccatactgcaccgggcgggaaggctatagtgagtcgtattaaggt

SEQ ID NO: 330 - DNA, 50 bp, synthetic construct
  source 1..50: mol_type = other DNA
atagccttcccgcccggtgcagtatggttgtaattccctagaaataggtt

SEQ ID NO: 331 - DNA, 50 bp, synthetic construct
  source 1..50: mol_type = other DNA
tcaaacgcctccagtacagcgcggctgactatagtgagtcgtattaaggt

SEQ ID NO: 332 - DNA, 50 bp, synthetic construct
  source 1..50: mol_type = other DNA
ctatagtcagccgcgctgtactggaggcgtttgagagtagtgaaaactac

SEQ ID NO: 333 - DNA, 50 bp, synthetic construct
  source 1..50: mol_type = other DNA
tcaaacgcacagccgggaagggctggtcctatagtgagtcgtattaaggt

SEQ ID NO: 334 - DNA, 50 bp, synthetic construct
  source 1..50: mol_type = other DNA
ctataggaccagcccttcccggctgtgcgtttgagagtagtgaaaactac

SEQ ID NO: 335 - DNA, 50 bp, synthetic construct
  source 1..50: mol_type = other DNA
tcaaacatggtttgcccggataaacggactatagtgagtcgtattaaggt

SEQ ID NO: 336 - DNA, 50 bp, synthetic construct
  source 1..50: mol_type = other DNA
ctatagtccgtttatccgggcaaaccatgtttgagagtagtgaaaactac

SEQ ID NO: 337 - DNA, 41 bp, synthetic construct
  source 1..41: mol_type = other DNA
tgtggagcgacatccagaggctatagtgagtcgtattagga

SEQ ID NO: 338 - DNA, 45 bp, synthetic construct
  source 1..45: mol_type = other DNA
cctctggatgtcgctccacagttttagagctagaaatagcaagtt

SEQ ID NO: 339 - DNA, 41 bp, synthetic construct
  source 1..41: mol_type = other DNA
taattcaattcgcgcgtcccctatagtgagtcgtattagga

SEQ ID NO: 340 - DNA, 45 bp, synthetic construct
  source 1..45: mol_type = other DNA
gggacgcgcgaattgaattagttttagagctagaaatagcaagtt

SEQ ID NO: 341 - DNA, 41 bp, synthetic construct
  source 1..41: mol_type = other DNA
agtcacgacgttgtaaaacgctatagtgagtcgtattagga

SEQ ID NO: 342 - DNA, 45 bp, synthetic construct
  source 1..45: mol_type = other DNA
cgttttacaacgtcgtgactgttttagagctagaaatagcaagtt

SEQ ID NO: 343 - DNA, 25 bp, synthetic construct
  source 1..25: mol_type = other DNA
cgaacatccaaaagtttgtgttttt

SEQ ID NO: 344 - DNA, 19 bp, synthetic construct
  source 1..19: mol_type = other DNA
tgagcgcatttttacgcgc

SEQ ID NO: 345 - DNA, 18 bp, synthetic construct
  source 1..18: mol_type = other DNA
gaaaacggcaacccgtgg

SEQ ID NO: 346 - DNA, 50 bp, synthetic construct
  source 1..50: mol_type = other DNA
ccgccgccgcaaggaatggtttaattaattacggccagtcatgcataatc

SEQ ID NO: 347 - DNA, 50 bp, synthetic construct
  source 1..50: mol_type = other DNA
gactgttgggcgccatctccttgcatgctcactgagcctccacctagcct

SEQ ID NO: 348 - DNA, 50 bp, synthetic construct
  source 1..50: mol_type = other DNA
ctcaaccgcccgttgcaccacagatgaactatagtgagtcgtattaaggt

SEQ ID NO: 349 - DNA, 50 bp, synthetic construct
  source 1..50: mol_type = other DNA
tatagttcatctgtggtgcaacgggcggttgagaatctttcgaaagaaag

SEQ ID NO: 350 - DNA, 50 bp, synthetic construct
  source 1..50: mol_type = other DNA
ctcaacccatgcagaggatgatgctcgtctatagtgagtcgtattaaggt

SEQ ID NO: 351 - DNA, 50 bp, synthetic construct
  source 1..50: mol_type = other DNA
atagacgagcatcatcctctgcatgggttgagaatctttcgaaagaaaga

SEQ ID NO: 352 - DNA, 50 bp, synthetic construct
  source 1..50: mol_type = other DNA
ctcaacgcgttagggtcaatgcgggtcgctatagtgagtcgtattaaggt

SEQ ID NO: 353 - DNA, 50 bp, synthetic construct
  source 1..50: mol_type = other DNA
tatagcgacccgcattgaccctaacgcgttgagaatctttcgaaagaaag

SEQ ID NO: 354 - DNA, 50 bp, synthetic construct; identical to SEQ ID NO: 348
  source 1..50: mol_type = other DNA

SEQ ID NO: 355 - DNA, 50 bp, synthetic construct; identical to SEQ ID NO: 349
  source 1..50: mol_type = other DNA

SEQ ID NO: 356 - DNA, 50 bp, synthetic construct; identical to SEQ ID NO: 350
  source 1..50: mol_type = other DNA

SEQ ID NO: 357 - DNA, 50 bp, synthetic construct; identical to SEQ ID NO: 351
  source 1..50: mol_type = other DNA

SEQ ID NO: 358 - DNA, 50 bp, synthetic construct; identical to SEQ ID NO: 352
  source 1..50: mol_type = other DNA

SEQ ID NO: 359 - DNA, 50 bp, synthetic construct; identical to SEQ ID NO: 353
  source 1..50: mol_type = other DNA

SEQ ID NO: 360-368 - skipped (9 entries)

SEQ ID NO: 369 - protein, 7 aa, synthetic construct
PKKKRKV

SEQ ID NO: 370 - protein, 16 aa, unidentified
KRPAATKKAGQAKKKK

SEQ ID NO: 371 - protein, 9 aa, unidentified
PAAKRVKLD

SEQ ID NO: 372 - protein, 11 aa, unidentified
RQRRNELKRSP

SEQ ID NO: 373 - protein, 38 aa, Homo sapiens
NQSSNFGPMKGGNFGGRSSGPYGGGGQYFAKPRNQGGY

SEQ ID NO: 374 - protein, 42 aa, unidentified
RMRIZFKNKGKDTAELRRRRVEVSVELRKAKKDEQILKRRNV

SEQ ID NO: 375 - protein, 8 aa, unidentified
VSRKRPRP

SEQ ID NO: 376 - protein, 8 aa, unidentified
PPKKARED

SEQ ID NO: 377 - protein, 8 aa, unidentified
PQPKKKPL

SEQ ID NO: 378 - protein, 12 aa, Mus sp.
SALIKKKKKMAP

SEQ ID NO: 379 - protein, 5 aa, Influenza virus
DRLRR

SEQ ID NO: 380 - protein, 7 aa, Influenza virus
PKQKKRK

SEQ ID NO: 381 - protein, 10 aa, Hepatitis delta virus
RKLKKKIKKL

SEQ ID NO: 382 - protein, 10 aa, Mus sp.
REKKKFLKRR

SEQ ID NO: 383 - protein, 20 aa, Homo sapiens
KRKGDEVDGVDEVAKKKSKK

SEQ ID NO: 384 - protein, 17 aa, Homo sapiens
RKCLQAGMNLEARKTKK

SEQ ID NO: 385 - protein, 170 aa, unidentified
MNEQTSTDEQFMQQALALADEAERQGEVPVGALLVHQGTVIGRGFNQVITQLDPSAHAEMLAIRDAARYLQNYRILDTTLYVTLEPCPMCAGALVHARVKRLVYGASDPRTGACGSVFNVVADTRLNHQLEVVAGVLGSQCGERLSAFFRQRRAAQKALKKAAQNFQSPS

SEQ ID NO: 386 - protein, 167 aa, unidentified
MTDSQNDTDEYWMGEALKLAQKAWDEGEVPVGAILVRKGEVIGHGWNRSIGSHDPSAHAEIMAIREAGVRIGNYRMLDTVLYVTLEPCAMCAGALVHGRISRLVFGAEDPKTGACGSVMDIARHPALNHQLQVDGGVMAAPCARLLSDFFRWRRAQKKAARDNSSGN

SEQ ID NO: 387 - protein, 173 aa, unidentified
MSTDFTSAAQQELDIAYMRKAIALAAQAEADGEVPVGAVLVHNNEIIGVGRNRVIGGCDPSLHAEFEAIRQGAQEIGNYRLLETTLYVTLEPCPMCAGLLVHSRIGRLVYGTPDLKTGAAGSLMNLLQHPELNHQIAITSGVLQADCAAQLSGFFSAQRERKKALKKRLKPNL

SEQ ID NO: 388 - protein, 182 aa, unidentified
MSEIPQVVTEQQTDERWMHYALALADKAEQAGEIPVGAVLVKDNQVIGEGWNMSICRHDPSAHAEMLAIREAAVRVQNYRLLDTTLYVTLEPCAMCAGLLVHSRVKRLVFGAFDAKTGAAGSVTDLVRHPVLNHQLEVTSGVLAEQCADKLSSFFRRRRQEHKAAKALRQAQDPENQGNSES

SEQ ID NO: 389 - protein, 151 aa, unidentified
MSDEIWIKHALTLADKAYQQGEVPVGAVLVKNNQIIAEGWNQPIAHHDPSAHAEIMALRLAGQAEQNYRLPETTLYVTLEPCVMCAGAMIHARIGRLVFGAYDPKTGAAGSVFDIFSDARHNHQIEVVSGVLSELCGDKLRAFFRERRKKR

SEQ ID NO: 390 - protein, 166 aa, unidentified
MPQSEQDIYWIRYAMQLAERAEQAGEVPVGAVLVLDNQALGEGWNLSISRHDPCAHAEIMAIRQAGERIGNYRLLGATLYVTLEPCVMCAGAMVHSRIARVVYGASDLKTGAAGSVFDVLSDPRHNHVVEITGGVESEACSQQLSDFFRRRRAEQKAEKQRLKDNQ

SEQ ID NO: 391 - protein, 168 aa, unidentified
MNVAADEQWMKEALRQAERALLAGEVPVGAVVVSQNNIVGQGFNRNLLDRDPTAHAEIIALREAAANIGNHRLLDCELYATIEPCAMCAGAITHARVRRLVYGAEDLKAGAVHSVMQVVNHPALNHRVEVKGGVLAERCGELLQQFFWARRAEQSGISGANEDQLRRG

SEQ ID NO: 392 - protein, 143 aa, unidentified
MLLAMEQARAAEEAGEVPVGAVILSPEGEVVARGENRVLRDSDPTAHAEMVALRAAGRVLGNYRLPGCTLYSTLEPCSMCSGAILHARVARLVFAASDPKAGACGSVLEVMNHPRLNHQVELVGGVLALECGQMLTEFFRARR

SEQ ID NO: 393 - protein, 210 aa, unidentified
MSAEIDLTDKAFMRQALDQAQNAWLLGEVPVGAVIVREGRVIATGYNRPIGDNDPTAHAEIVALRQAASLLGNYRLPGCTLYVTLEPCAMCAMALMHARLDRVVFGAPDPKTGAAGSVINLFDEPRLNHHCALRGGVEAQDCARLLQDFFRERRRQIQALQQKPAIPADRADPDEQHASLHAEGPAPLAGIDVRHLDEPDAAATSNPESP

SEQ ID NO: 394 - protein, 159 aa, unidentified
MEIKARMRDIMTDDERWMAKALRLAKEGAQAGEVPVGAILVFSGEQLAAAYNSPIRLRDATAHAEILALRLGGERLQNYRLTGCTLYVTLEPCAMCAGALVQARIARLVFGARDSRVGAAGSALDLAREPRFNHQVTVVGGVLASECEQVLREFFRARR

SEQ ID NO: 395 - protein, 205 aa, unidentified
MPEPFQGGDPADPARAAAEAQDLADRAFMRLALDQAHNAWLLGEVPVGAVIVHEGRVLATGYNRPIGDSDPTAHAEIVALRQAASLLGNYRLPGCTLYVTLEPCAMCAMALLHARIERVVFGASDPKTGAAGSVLDLFAQPLLNHHASLRAGVEAQACGALLQEFFRERRARARAQQQLPAHGGGIDVRHLDAPEPGDESDPFDE

SEQ ID NO: 396 - protein, 159 aa, unidentified
MGSDQDFMRLALLEAEKAGAIGEVPVGAVIVKDGKVVARGHNQPVSGHDPTAHAEIMALREAGQVLGNYRLPACDLYVTLEPCAMCIGAMIHARIRRVIFGAHDPKTGAAGSVINLFEEKTLNHHATVTGGILASDCAQLLKAFFAMRRKEAKTPSLSG

SEQ ID NO: 397 - protein, 168 aa, unidentified
MEPMEEHRHFMGLAIEEAARAYELNEVPVGAVLVGSAGEILSRASNAPIRSADPSAHAEMIALRQAARASGNYRLPGSVLYVTLEPCVMCVGAMLHARIATLVFGARDPRTGAAGSVVDLTSVPAFNHYVRVIAGVRAEECSELLRRFFRERRREGKSGYGGEVPKRP

SEQ ID NO: 398 - protein, 153 aa, unidentified
MADEDIKFMRLALELAKKAEFIDEVPVGALIIKDGEIIGTGMNSCISDHDPTSHAEIKAIRDAANTIKNYRLNGCSIYVTLEPCAMCVGAIQHARIEKIIYGANDPKTGACGSVIDLMSIKEINHHTEAIGGVLQKECGQILKDFFLSKRKKP

SEQ ID NO: 399 - protein, 148 aa, unidentified
MQRALGRAGDARAQGEVPVGAVVVCAGEVVGEGCNRNISLDDPSAHAEILALRAAGQRLGNYRLPGCTLYVTLEPCAMCVGAAIHSRLDGVVFGATDPKTGALGGAFDLPASHAHNHVLSVRGGLLADECGALLKAFFRDRRKAPRAP

SEQ ID NO: 400 - protein, 191 aa, unidentified
MQKKVDDFLKIVEPPDAERRTKGKLLQQRAVDEQWMGLALQRGEEAGRQGEVPVGAVVVGKDGFLTAAGNSPIGLADPSAHAEMLAIRAAAKLLGNYRLPEATLYVTLEPCIMCMGALIQARISRLVFGAADPKTGAAISVYAIGTDQRLNHTVAVTGGILAEACAQLLKNFFKKRRGHSPVINSPFLKTP

SEQ ID NO: 401 - protein, 144 aa, unidentified
MREAYALALIAYEQGEVPVGAVLVGEDDEILGRGWNQVIQRHDPMAHAECVAIQEAAAQLRNYRLNGSTLYVTLEPCCMCAGAMVHARIARLVFGARDVRSGAAGSAYNLLAGDLLNHRVKIDEGILQQECSHLLRNFFKQRRD

SEQ ID NO: 402 - protein, 195 aa, unidentified
MTSQVSRQQPLSGNNLVHNDLIASVCPPGLVPAQQDEFWMQQALVLARQAEMMGEVPVGAVVVKNQQLIGYGYNQSITLNDPSAHAEVLALRMAGQTLTNYRLPDTTLYVTLEPCAMCATTMVHARVARLVYGAADLKTGAAGSVLNLTNYTAFNHQLSCVSGVLQRDCSYLLSNFFKLRRTQHKAKKVSGTFIR

SEQ ID NO: 403 - protein, 162 aa, unidentified
MDHERYMRRAIELAQQAESLGEVPVGAVIVHDHQIIGEGFNEVIRRNDPSAHAEAQAIRAAGQHLANYRLVNTTLYVSLEPCAMCAGLIVHARVKTVVFATPDPRTGATGTAIQVLNHPSMNHHVEVVSGVLQEQSATILQNFFRKKRELAKMKKFHEKRVN

SEQ ID NO: 404 - protein, 166 aa, unidentified
MSDEHFMRLALAQAALAEAEGEIPVGAVVVLNGEVVGSGYNSPIGRHDPTAHAEIRALRAAAATLGNYRLVGCELFVTLEPCLMCAGAIQHARIARLVYGAADYKTGVCGSTLDVFGELPGSPVPRLNHHTQVTGGVLGDECSRQLSAFFARRRAEKNAAKNHVFQ

SEQ ID NO: 405 - protein, 161 aa, unidentified
MDSLVERHEHYMMLALRLAEKGADRGEVPVGAVVVSPKGQILSLAHNEPIDLHDPTGHAEIIAIRKAAQRIGNYRLVGCSLYVTLEPCVMCYGAIIHARIKRLFFGAYDPKAGAGTVFGLFSSPFFNHQPEVRGGILAELCEKVLKEFFEKLRSSKCCSSG

SEQ ID NO: 406 - protein, 152 aa, unidentified
MTEDERWMEEALALAREASNDGEAPVGAVVVHAGEIIGRGRNRIEGLADPTAHAELLALRQASMNLGRWRLTGCALFVTLEPCAMCLGACYAARVDRLVYGATSPKFGAAGSSVTLAGVERLNHRLEVVSGVLEKECARLLAKFFRGLRGKG

SEQ ID NO: 407 - protein, 168 aa, unidentified
MDDQHWMGRALALAERAAEQGEVPGGAVLVIENEIVGEGWSRPIATQDPSAHAEILALRDAGLRRGNYRLSGSVLYVTLEPCVMCAGAIVHARVDTLVFGAADPKAGACGSVFDLLPSDGRFNHHTQCRGPILADACGTILRAFFANKRASPRARANASAAHERPEND

SEQ ID NO: 408 - protein, 173 aa, unidentified
MSESQFDETQYRWMDRALELAGQAANLGEVPVGAVIVSAEGELLGEGFNQPIKVQDPTAHAEIMAIRQACRKTGNYRLPGAVLYVTLEPCAMCAGAIVHARLARVVFATCEPKAGAVESTLRFFDLPQLNHRVEYTGGLRRSEASSLLSHFFQSRREEKALLKKNSRQQQSDC

SEQ ID NO: 409 - protein, 164 aa, unidentified
MREEKDLIFMKKALHLAEEAWRQGEVPVGAVVVDGEGQIIGQGYNQSIALLDPTAHAEIVALRQAAKKKKNYRLSGSTLYVTLEPCPMCLGAMVQARIDRLVFGAYDPKNGAVSSIMNFPLDKMNHRFEIEGGLLSQECATILKEFFQSRRGETNNKKETAKEE

SEQ ID NO: 410 - protein, 153 aa, unidentified
MDTDEQFMQHAIQLAHKAQSQGEVPVGAILVKDNKIIGKGWNQPITRHDPSAHAEIMAIRHAGQALKNYRLPDTTLYVTLEPCNMCAGMIIHARIKRLVFAAYDPKTGAAGSVFDTLTDPRNNHTVEIEGGVLEEPCAEMLRHFFRQRRKKTP

SEQ ID NO: 411 - protein, 158 aa, unidentified
MSELENNNPQHIKWMREAIKLAQKAQECGEVPVGALITKNDTLISSAYNQPITKHDPTAHAEIQALQQAGKILQNYRLNDTVLYITLEPCAMCAGAIVHARIGTVVFGAYDHKTGVAGSAGNIFTAEFSNHKPKIIGGTLEKECSLIIRNFFQARRQK

SEQ ID NO: 412 - protein, 182 aa, unidentified
MPNFLKQLQQIIAFETSCAADWSEQQKHVFWMQQALKVAAYGEQLGEVPVGAVAVVENQLIAVGWNASISKHDPTAHAEVMALRAAGTVLKNYRQLQLTLYVTLEPCAMCAGAMVHARIAQLVYGASDPKTGAVDSVFNLLRHPNLNHQAPVLGGVLATECRTQLQDFFRRRRQEKKQAQQK

SEQ ID NO: 413 - protein, 167 aa, unidentified
MESVDEQWMRYAIRLAQRAEEQGEVPVGAVLVKGDRCLAEGWNVPVQRHDPTAHAEMVAIRDAGIALENYRLIDSTLYVTLEPCVMCMGAIAHARIKRLVFGAFDPKRGAVCNALSLTDASFLNHKVVWDGGVFEQECSELLIDFFKARRKVTKPEVVVTNPQRHGM

SEQ ID NO: 414 - protein, 160 aa, unidentified
MYNQQAIDKHFMNCALELATFAADSGEVPVGAVIVRKNTIVAKGSNSPIADHDPTAHAEIIAIRKATAQCANYRTPDTTLYVTLEPCIMCMGAIIQARIGRLVFGAYDAKTGAAGSCYSIGQDNLLNHSLEIAGGINEQQCAILLKKFFKIRRKKGSKNN

SEQ ID NO: 415 - protein, 150 aa, unidentified
MSDLEWMRRAITLAQKAEQQGEVPVGALLVREGVCVGEGWNQPILRHDPSAHAEINALRDAGQATENYRLIDTVLYVTLEPCVMCMGAIANARVRRLVFGASDPARGAAGSILSLSNASFLNHHIETEGGLLAEECSELLRSFFARRRRK

SEQ ID NO: 416 - protein, 155 aa, unidentified
MSPVVAESDRAWMRHALELANRAGEEGEVPVGAVMVKDGQLVGEGWNRVIGLNDPSAHAEILALREAGQRLGNYRLPGCSLYVTLEPCAMCAGAMLHARLERVYFGTGDPKTGALGGTFDLFADYPHNHRIETQGGLLEIECSSLLKEFFRARRL

SEQ ID NO: 417 - protein, 194 aa, unidentified
MGLNGLTHHSPFIPISENIDTSDKLALQIMSLKLSNPDEKWMRHAQSLAEHAAAQGEIPVGAVIVQAGECIAEGWNQPIANNDPTAHAEIIALRKAAQYLNNYRLVNTLLYVTLEPCVMCAGAIIQARVKRVIFGAYDPKAGAAGSRFDILRDTRHNYQVECISGVLAKECSDYLSRFFKNRRTRAKPSRFPKP

SEQ ID NO: 418 - protein, 174 aa, unidentified
MQDDTVPEEIDHERWMRQALNEAMDAAEEGEVPVGAVVVYENRIIGRGHNRTVATHDPSAHAEILALGAAGAAVGDWRLTGVDIYVSLEPCAMCAGAIQLGRLRRAVFGPRDPKFGGCGSVLDVLREPRLNHQVEVIEGVMAAESQHLLKEFFRRLRAKDRVPATPDPFPNAGE

SEQ ID NO: 419 - protein, 149 aa, unidentified
MEEEYFMREALKEAEKAAQEGEVPIGAVVVGPSREIIGRGYNRPIGLCDPTAHAEIMALREAAKRLGNYRLLDCEIYVTLEPCPMCAGALVYARLKRLVFGAHDPKAGACGSVYNIVQDKRLNHQLEVAGGLLAEECRALLQAFFKSRR

SEQ ID NO: 420 - protein, 160 aa, unidentified
MFEFSDNKAEFFMKQAILQAIRAWKKGEVPVGAVVVSGAGQILASAHNCPISLDDPTAHAEILALRLAAGKVGNYRLTDSWLISTLEPCVMCAGAMVWARVKGVVFGARDPVSGAFGSVMDINEVPGLNHRIEVTEGVLAAECSQLLKDFFKRRRQSSAG

SEQ ID NO: 421 - protein, 148 aa, unidentified
MTDENWMQRALQLAAQAEAVGEVPVGAVIVKNDTLVAEGFNQPIGAHDATAHAEIVALRRAGEALGNYRLVDTTLYVTLEPCSMCVGAMIHARVAKVVFGASDPRTGALGGAFDLQQAGRHNHRFDVVSGVMADSSRQLLQNFFRVRR

SEQ ID NO: 422 - protein, 149 aa, unidentified
MTEDEKWMNLAIEQAIKAQDEDEVPVGAVLVKNGLLLSQAHNQPISTNDATAHAEIQALRKAGIKLQNYRLTDSTLYVTLEPCAMCLGAMMHARIARIVYGANDLKTGACGSSENLLNANCFNHKIHLISGVLENECKQLLKKFFNSRR

SEQ ID NO: 423 - protein, 185 aa, unidentified
MNQVNCGRIGSRLIRTGGVNISRAPIEEDPVNDLQYAQDTKWMRCALDCARRAYSTEEVPIGAVLVRNEQIIGEGFNQTIRNLDPTSHAEIMAIRSAAENIGNYRLSDTTLYVTIEPCMMCLGAIIHARVERLVFGAQEPKAGVLKSHPVFDGDFLNHQVKWSSGILESECSRLMRDFFIHKRTL

SEQ ID NO: 424 - protein, 203 aa, unidentified
MAPVPLKQPLAGESFDAHDHAMMRLAIDQALNAQLHGEVPVGAVLVKGGQVIATGYNHPIGSHDPTAHAEIRTLRMAAEQLGNYRLGESTLYVTLEPCMMCLGAMLHARITRVVFGASDPKTGVCGGVLDLPAEGRLNHQTTVQGGLLAEECGELLQRFFAERRAQRRADREALRAQQDELLRWAATLPAEEEVGTLRLDEET

SEQ ID NO: 425 - protein, 150 aa, unidentified
MAMALAEAEKAMQIGEVPIGAVVVGPDQQLLGTGYNQSICLNDPSAHAEMLAIRAAAAQLGNYRLRDCTLYVTLEPCAMCMGAILHSRIQRVVFAAADPKTGACGSVLSLQSEPRLNHHCSVTQGVLAERAASLIKGFFKARRQVKKCRC

SEQ ID NO: 426 - protein, 164 aa, unidentified
MLHMVYYEINETNSQDVFFMRRALTLAQKAASADEVPVGAVAIANNEIIGEGFNCPIGTHDPTAHAEIMALRQAAQKSNNYRLPEVTLYVTLEPCVMCVGAMLHARIKRLVFGAIDQKTGAVVSVFKILDEKNLNHRIQYQSGVLAVPCGKILSDFFKDRRGVI

SEQ ID NO: 427 - protein, 180 aa, unidentified
MTALITTSNIHDKMMSLALKEAFKAYKLGEIPVGCVITDENNELVATGFNRTIIDNDPSAHAEIVALRKAGEKLQNYRLVNLNLYVTLEPCTMCSGAIIHARIKRVFFGAYDLKTGACGSVFNVLNDDRHNHKVEIYGGILKEECSSMLSDFFKARRKMQKEGRDWIVESGKDRTWLNKD

SEQ ID NO: 428 - protein, 153 aa, unidentified
MISDTEFMGAALELALAASKLGEVPVGAVVVKGGRIIGTGSNAPISRHDPTAHAEILALRAAASALENYRLTECTLYVTLEPCAMCAGAIQHARIARLVFGASDSKTGACGSVVNLFGEPMLNHHTQVQGGMLARDCGELLSDFFRQRRAAVQ

SEQ ID NO: 429 - protein, 160 aa, unidentified
MSGSDAAASRACMEQALACARDAEAAGEVPVGAVIVDAAGAVVARAANAPIARNDPTAHAELLVLRAAGRVLGNYRLPGCVLYVTLEPCAMCVGALVHARIARIVYGAPDPKTGACGSVFDLAANSKMNHRIEVAGGVLAEECGALLKQFFAARRGRDAP

SEQ ID NO: 430 - protein, 151 aa, unidentified
MFSRADQVFMRQALELAKQAKGEGEVPVGAVLTLNDLPIATAYNQSITHQDPTAHAEIIVLREAAKILKNYRLVNTVLYVTLEPCAMCAGALIHARVKRLIYATADPRTGACGSIFNLINHQALNHQIQYESGLLAEESKLLLQQFFQKRR

SEQ ID NO: 431 - protein, 148 aa, unidentified
MNDEHYIQYALNLAQKAESENEVPVGALIVCNNQIIAEGWNQPIQLHDSSAHAEMLALRKASHHIENYRLKNTTLYVTLEPCAMCVGAMIHARIQKLVFGAWDQKAGAVHSVFQLIDDTRHNHAIEWRGGVMADACSRVLKNFFKQRR

SEQ ID NO: 432 - protein, 153 aa, unidentified
MTSHDDTYWIIHALTLAKKAEQQGEVPVGAVIVHDHQIVGEGWNQPIGAGDPTAHAEIIAMRNAAQHLKNYRLINCTLYVTLEPCAMCVGAMVHARISRLVFGAFDPKAGAVTSVMQLLDAPHFNHIVTHQGGICAEKCSEILKSFFAMKRKT

SEQ ID NO: 433 - protein, 155 aa, unidentified
MTDDRDLYWMQQALLLAVDAGRRGEVPVGALLVLDEVSIGVGYNRPIGDRDPTAHAEIIALRDAAKKINNYRLLDTTLYVTLEPCMMCAAAMVHARIKRLVYGAPDPKAGAIVSQAQILDAPFFNHRVAYYGNLLAMPCGELLRTFFKAKRLSST

SEQ ID NO: 434 - protein, 153 aa, unidentified
MRLAMDMAKEAYSIGEVPVGCVIADADGNVISTGYNRSITDNDPSAHAEMVAIRNAGSLLKNYRMPGLSLYVTLEPCCMCSGAIIHARIARVYYGASDLKTGACGSVFNVMSDPRHNHSVECIGGILADECSKMLSDFFKERRQQKKAEATKL

SEQ ID NO: 435 - protein, 174 aa, unidentified
MTVNHEYFMRLAIEQALLAYQAGEIPVGAVIVDTDGNVIGRGFNRTILDNDPSAHAEIVALRDAGERVKNYRLINLDMYVTLEPCTMCSGALIHSRLNNLYFGAYDLKTGACGSRFNILGSSEYNHIVNVTGGILKEECQNIISDFFKARRKMQKDGRDWIVESGKVRSWQKNV

SEQ ID NO: 436 - protein, 172 aa, unidentified
MTSPTAGLGETDEYWMNRALALAAEAGESGEVPVGAVVVLDGREVGAGYNGPIGSCDPTAHAEIRALRDAGARAGNYRLPGATLYVTLEPCTMCVGAIVHARINRLVYGTTEPKAGAVESIRQTLRDDHFNWQVEATGGVLASQCREIIQRFFAGRREYHRLRKQTLSVKEQ

SEQ ID NO: 437 - protein, 158 aa, unidentified
MPDLDDGYWMQQALKLAAQAKDQGEVPVGALVVGEQKLLGQGYNQVISLQDPSAHAEVMALRGAGITQQNYRLVNTTLYVTLEPCMMCAGVLVHARIKRLVFGAYDPKAGAISSCAQLLTLPHLNHQILVQGGILAKECGQQLTDFFKAKRQAKHDKG

SEQ ID NO: 438 - protein, 157 aa, unidentified
MTAAAEFDEHDLRWMRQALELARRAERDHAEVPVGAVLVIDNEVIGSGMNRNIIDHDASAHAEIVCLRDAGQRVANHRFPGSTLYVTLEPCVMCAGAIVHARVGRVVYAASDPKTGAAGSVFDILTSERHNHRVAVRGGLLAEESARLLQLFFRSRR

SEQ ID NO: 439 - protein, 176 aa, unidentified
MSESSAVYSDEYWLRYALQLAERAYQQGEVPVGAVLVRDNQILGEGWNQSISQHDATAHAEIMALRAAGLVAGNYRLPNTSLYVTLEPCVMCAGALLHARVERVVFGAYDPKTGAVGSMFDVLLDARHNHQVQLTGGVLQADCVAQLQAFFKERRLAQKLAKFNSVTISSPTSTEN

SEQ ID NO: 440 - protein, 158 aa, unidentified
MSLADRHEMFMQMALQQAQLAYDCAEVPVGAVVVNSAGEVIGKGYNRTIIDSDPTAHAEIVALRQAAAHEQNYRLPDLTVYVTLEPCVMCIGALTHARIAHVVYGASDPKTGACGSVLCIQANKKINHHTRITSGVLEQACAEKLRHFFRERRKGSKL

SEQ ID NO: 441 - protein, 154 aa, unidentified
MADDDFMALAIEQALLAQAQGEVPVGAVLVDGSGHVIGRGANAVIGLSDPTAHAEIVALRSAAKLLGNYRLPQTTLFVTLEPCAMCLGALFHARVSRIVFGAPDPKTGACGSRLDLTAPDLINFHASVRGGVMQEACGHLLTDFFKRKRSEKLS

SEQ ID NO: 442 - protein, 204 aa, unidentified
MRVALGAAREAQAAGEVPVGAVIVRDGVLIATGRNAPRQQHDPTAHAEIAALRAAARRLGNYRLDGCTLYVTLEPCLMCVGAMLHARLERVVFGAPDPKTGAAGSVFNALAEPKLNHQTTVEGGVLATECAALLQVFFGQRRLLQRISAQPLRDDALRTSEARMAAFASPLSRWVCDLPALQGLRLHYLDMGPSTEGRAWLLLH

SEQ ID NO: 443 - protein, 168 aa, unidentified
MNTEQSKPLLGDAHFMQQALQLADAAFALQEVPVGAVVVQDGIIIGRGFNAPITQHDPCAHAEILALRDAAKNIGNYRLVGCELFVTLEPCVMCAGAMMHARIARVVYGAYDLKTGACGSVQNVFNEPRWNHHTICTGGVLAEQCGTKLSQFFALRRAQKKSLTATWT

SEQ ID NO: 444 - protein, 283 aa, unidentified
MKVTLGGQTIDVEEVLKRISSTTVAAALIKDGEVVAVEETGGEHAEKKLVRKHDVEGAVIFVTARPCRYCAEAMAEAGVAGVVYLGKGRGYGPYLLERLGVPCVEVHPSEPPAWRPVPRLDVLITFGGNPYLTEEDVAARTYALLTGIGVEAEVVPAPNNMAGRVEVMVKRGDPDRAHGRLKETFGPVFKVRRFQLSGDYEDRESLAEDVLEVVEPLIEDPFAVRANVASPGPTFSGSKEAEVFIGDVLTSAGHEVDLEDPRTLVHVDVLGRRVSVGVERRDG

SEQ ID NO: 445 - protein, 279 aa, unidentified
VKITLAGETIDVEKVLREIPTRTVTAALIKDGEVKAYEEADGEHAEKKLIRNHDVSDGVVFVTIRPCLYCARELAKAGVAGVVYIGRGRGLGPYYLARKGIEVVEVNPSRPLHYDPVERLDVLVTFGGNPYLTEEDVAARVYCLLTGKGIKAEIAPAPENLAGRVEVMITDGDSERAARVIERELPTFNVRHFLLSDRFDDREELSKRVLEEIEPRVEDPFAVRARIARAGLFSSSRDAEVFLGDVLTSAGHEVDLDEPRTVVHVDVLGDRVSVGVEKR

SEQ ID NO: 446 - protein, 283 aa, unidentified
MKVTLGGQTIDVEEVLKRISSTTVAAALIKDGEVVAVEETGGEHAEKKLVRKHDVEGAVIFVTARPCRYCAEAMAEAGVAGVVYLGKGRGYGPYLLERLGVPCVEVHPSEPPAWRPVPRLDVLITFGGNPYLTEEDVAARTYALLTGIGIEAEVVPAPNNMAGRVEVMVKRGDPDRAHGRLKETFGSVFKVRRFQLSGDYEDRESLAEDVLEVVEPLIEDPFAVRANVASPGPTFSGSKEAEVFIGDVLTSAGHEVDLEDPRTLVHVDVLGRRVSVGVERRDG

SEQ ID NO: 447 - protein, 280 aa, unidentified
MRSAEYLAYLRRRYGLRPNRRLGQHFMVDDRLLRFMVEAAGVGPEDTVLEIGPGPGLLTRYLIERAGRVVAVELDERLVEVLERELGDAENLEIVHADFLEYGVPEEVNKVVSNLPYQISSEATFEILRSDVERAVLTYQREFAERMTAEPGTRGYGRLTVMVNLLARVEVLRAVPRRAFVPPPRVSSAIVRLEPRPESELPDVDPETLEAVCRGLFQHRRKTVRNALRLSAHEWGGDEEVVEEVLRRLPEELLDKRPLHLTPEEVVRVARCVERARGSS

SEQ ID NO: 448 - protein, 167 aa, synthetic construct
MTDSQNDTDEYWMGEALKLAQKAWDEGEVPVGAILVRKGEVIGHGWNRSIGSHDPSAHAEIMAIREAGVRIGNYRMLDTVLYVTLEPCAMCAGALVHGRISRLVFGAENPKTGACGSVMDIARHPALNHQLQVDGGVMAAPCARLLSDFFRWRRAQKKAARDNSSGN

SEQ ID NO: 449 - protein, 167 aa, synthetic construct
MTDSQNDTDEYWMGEALKLAQKAWDEGEVPVGAILVRKGEVIGHGWNRSIGSHDPSAHAEIMAIREAGVRIGNYRMLDTVLYVTLEPCAMCAGALVHGRISRLVFGVENPKTGACGSVMDIARHPALNHQLQVDGGVMAAPCARLLSDFFRWRRAQKKAARDNSSGN

SEQ ID NO: 450 - protein, 167 aa, synthetic construct
MTDSQNDTDEYWMGEALKLAQKAWDEGEVPVGAILVRKGEVIGHGWNRSIGSHDPSAHAEIMAIREAGVRIGNYRMLDTVLYVTLEPCAMCAGALVHGRISRLVFGAENPKTGACGSVMDIARHPALNHQLQVDGGVMAAPCARLLSYFFRWRRAQKKAARDNSSGN

SEQ ID NO: 451 - protein, 167 aa, synthetic construct
MTDSQNDTDEYWMGEALKLAQKAWDEGEVPVGAILVRKGEVIGHGWNRSIGSHDPSAHAEIMAIREAGVRIGNYRMLDTVLYVTFEPCAMCAGALVHGRISRLVFGAENPKTGACGSVMDIARHPALNHQLQVDGGVMAAPCARLLSDFFRWRRAQKKAARDNSSGN

SEQ ID NO: 452 - protein, 167 aa, synthetic construct
MTDSQNDTDEYWMGEALKLAQKAWDEGEVPVGAILVRKGEVIGHGWNRSIGSHDPSAHAEIMAIREAGVRIGNYRMLDTVLYVTLEPCAMCAGALVHGRISRLVFGAENPKTGACGSVMDIARYPALNHQLQVDGGVMAAPCARLLSDFFRWRRAQKKAARDNSSGN

SEQ ID NO: 453 - protein, 167 aa, synthetic construct
MTDSQNDTDEYWMGEALKLAQKAWDEGEVPVGAILVRKGEVIGHGWNRSIGSHDPSAHAEIMAIREAGVRIGNYRMLDTVLYVTLEPCAMCAGALVHGRISRLVFGAENPKTGACGSVMDIARHPALNHQLQVDGGVMAAPCNRLLSDFFRWRRAQKKAARDNSSGN

SEQ ID NO: 454 - protein, 167 aa, synthetic construct
MTDSQNDTDEYWMGEALKLAQKAWDEGEVPVGAILVRKGEVIGHGWNRSIGSHDPSAHAEIMAIREAGVRIGNYRMLDTVLYVTLEPCAMCAGALVHGRISRLVFGAENPKTGACGSVMDIARHPALNHQLQVDGGVMAAPCARLLCDFFRWRRAQKKAARDNSSGN

SEQ ID NO: 455 - protein, 167 aa, synthetic construct
MTDSQNDTDEYWMGEALKLAQKAWDEGEVPVGAILVRKGEVIGHGWNRSIGSHDPSAHAEIMAIREAGVRIGNYRMLDTVLYVTLEPCAMCAGALVHGRISRLVFGAENPKTGACGSVMDIARHPALNHQLQVDGGVMAAPCARLLSDFFRWRRAQKNAARDNSSGN

SEQ ID NO: 456 - protein, 167 aa, synthetic construct
MTDSQNDTDEYWMGEALKLAQKARDEGEVPVGAILVRKGEVIGHGWNRSIGSHDPSAHAEIMAIREAGVRIGNYRMLDTVLYVTLEPCAMCAGALVHGRISRLVFGAENPKTGACGSVMDIARHPALNHQLQVDGGVMAAPCARLLSDFFRWRRAQKKAARDNSSGN

SEQ ID NO: 457 - protein, 167 aa, synthetic construct
MTDSQNDTDEYWMGEALKLAQKAWDEGEVPVGAILVRKGEVIGHGWNRSIGSHDPSAHAEIMAIREAGVRIGNYRMLDTVLYSTLEPCAMCAGALVHGRISRLVFGAENPKTGACGSVMDIARHPALNHQLQVDGGVMAAPCARLLSDFFRWRRAQKKAARDNSSGN

SEQ ID NO: 458 - protein, 167 aa, synthetic construct
MTDSQNDTDEYWMGEALKLAQKAWDEGEVPVGAILVRKGEVIGHGWNRSIGSHDPSAHAEIMAIREAGVRIGNYRMLDTVLYVTLEPCAMCAGALVHGRISRLVFGAENPKRGACGSVMDIARHPALNHQLQVDGGVMAAPCARLLSDFFRWRRAQKKAARDNSSGN

SEQ ID NO: 459 - protein, 167 aa, synthetic construct
MTDSQNDTDEYWMGEALKLAQKAWDEGEVPVGAILVRKGEVIGHGWNRSIGSHDPSAHAEIMAIREAGVRIGNYRMLDTVLYVTLEPCAMCAGALVHGRISRLVFGAENPKTGACGSVMDIARHPALNHQLQVDGGVMAAPCARLLSRFFRWRRAQKKAARDNSSGN

SEQ ID NO: 460 - protein, 167 aa, synthetic construct
MTDSQNDTDEYWMGEALKLAQKAWDEGEVPVGAILVRKGEVIGHGWNRSIGSHDPSAHAEIMAIREAGVRIGNYRMLDTVLYVTLEPCAMCAGALVHGRISRLVFGAENPKTGACGSVMDIARHPALNHQLQVDGGVMAAPCARLLSDFFRWRPAQKKAARDNSSGN

SEQ ID NO: 461 - protein, 167 aa, synthetic construct
MTDSQNDTDEYWMGEALKLAQKAWDEGEVPVGAILVRKGEVIGHGWNRSIGSHDPSAHAEIMAIREAGVRIGNYRMLDTVLYVTLEPCAMCAGALVHGRISRLVFGVENPKTGACGSVMDIARHPALNHQLQVDGGVMAAPCARLLSYFFRWRRAQKKAARDNSSGN

SEQ ID NO: 462 - protein, 167 aa, synthetic construct
MTDSQNDTDEYWMGEALKLAQKAWDEGEVPVGAILVRKGEVIGHGWNRSIGSHDPSAHAEIMAIREAGVRIGNYRMLDTVLYVTFEPCAMCAGALVHGRISRLVFGVENPKTGACGSVMDIARHPALNHQLQVDGGVMAAPCARLLSYFFRWRRAQKKAARDNSSGN

SEQ ID NO: 463 - protein, 167 aa, synthetic construct
MTDSQNDTDEYWMGEALKLAQKAWDEGEVPVGAILVRKGEVIGHGWNRSIGSHDPSAHAEIMAIREAGVRIGNYRMLDTVLYVTFEPCAMCAGALVHGRISRLVFGVENPKTGACGSVMDIARYPALNHQLQVDGGVMAAPCARLLSDFFRWRRAQKKAARDNSSGN

SEQ ID NO: 464 - protein, 167 aa, synthetic construct
MTDSQNDTDEYWMGEALKLAQKAWDEGEVPVGAILVRKGEVIGHGWNRSIGSHDPSAHAEIMAIREAGVRIGNYRMLDTVLYVTFEPCAMCAGALVHGRISRLVFGVENPKTGACGSVMDIARYPALNHQLQVDGGVMAAPCNRLLSYFFRWRRAQKKAARDNSSGN

SEQ ID NO: 465 - protein, 167 aa, synthetic construct
MTDSQNDTDEYWMGEALKLAQKAWDEGEVPVGAILVRKGEVIGHGWNRSIGSHDPSAHAEIMAIREAGVRIGNYRMLDTVLYVTFEPCAMCAGALVHGRISRLVFGVENPKTGACGSVMDIARYPALNHQLQVDGGVMAAPCARLLCYFFRWRRAQKKAARDNSSGN

SEQ ID NO: 466 - protein, 167 aa, synthetic construct
MTDSQNDTDEYWMGEALKLAQKAWDEGEVPVGAILVRKGEVIGHGWNRSIGSHDPSAHAEIMAIREAGVRIGNYRMLDTVLYVTFEPCAMCAGALVHGRISRLVFGVENPKTGACGSVMDIARYPALNHQLQVDGGVMAAPCARLLSYFFRWRRAQKNAARDNSSGN

SEQ ID NO: 467 - protein, 167 aa, synthetic construct
MTDSQNDTDEYWMGEALKLAQKAWDEGEVPVGAILVRKGEVIGHGWNRSIGSHDPSAHAEIMAIREAGVRIGNYRMLDTVLYVTFEPCAMCAGALVHGRISRLVFGVENPKTGACGSVMDIARYPALNHQLQVDGGVMAAPCARLLCYFFRWRRAQKNAARDNSSGN

SEQ ID NO: 468 - protein, 167 aa, synthetic construct
MTDSQNDTDEYWMGEALKLAQKARDEGEVPVGAILVRKGEVIGHGWNRSIGSHDPSAHAEIMAIREAGVRIGNYRMLDTVLYVTFEPCAMCAGALVHGRISRLVFGVENPKTGACGSVMDIARYPALNHQLQVDGGVMAAPCARLLCYFFRWRRAQKNAARDNSSGN

SEQ ID NO: 469 - protein, 167 aa, synthetic construct
MTDSQNDTDEYWMGEALKLAQKARDEGEVPVGAILVRKGEVIGHGWNRSIGSHDPSAHAEIMAIREAGVRIGNYRMLDTVLYVTFEPCAMCAGALVHGRISRLVFGVENPKTGACGSVMDIARYPALNHQLQVDGGVMAAPCNRLLCYFFRWRRAQKNAARDNSSGN

SEQ ID NO: 470 - protein, 167 aa, synthetic construct
MTDSQNDTDEYWMGEALKLAQKARDEGEVPVGAILVRKGEVIGHGWNRSIGSHDPSAHAEIMAIREAGVRIGNYRMLDTVLYVTFEPCAMCAGALVHGRISRLVFGVENPKTGACGSVMDIARYPALNHQLQVDGGVMAAPCNRLLCYFFRWRPAQKNAARDNSSGN

SEQ ID NO: 471 - protein, 167 aa, synthetic construct
MTDSQNDTDEYWMGEALKLAQKARDEGEVPVGAILVRKGEVIGHGWNRSIGSHDPSAHAEIMAIREAGVRIGNYRMLDTVLYSTFEPCAMCAGALVHGRISRLVFGVENPKTGACGSVMDIARYPALNHQLQVDGGVMAAPCNRLLCYFFRWRPAQKNAARDNSSGN

SEQ ID NO: 472 - protein, 167 aa, synthetic construct
MTDSQNDTDEYWMGEALKLAQKARDEGEVPVGAILVRKGEVIGHGWNRSIGSHDPSAHAEIMAIREAGVRIGNYRMLDTVLYSTFEPCAMCAGALVHGRISRLVFGVENPKTGACGSVMDIARHPALNHQLQVDGGVMAAPCNRLLCYFFRWRPAQKNAARDNSSGN

SEQ ID NO: 473 - protein, 167 aa, synthetic construct
MTDSQNDTDEYWMGEALKLAQKARDEGEVPVGAILVRKGEVIGHGWNRSIGSHDPSAHAEIMAIREAGVRIGNYRMLDTVLYSTFEPCAMCAGALVHGRISRLVFGVENPKTGACGSVMDIARHPALNHQLQVDGGVMAAPCNRLLCRFFRWRPAQKNAARDNSSGN

SEQ ID NO: 474 - protein, 167 aa, synthetic construct
MTDSQNDTDEYWMGEALKLAQKARDEGEVPVGAILVRKGEVIGHGWNRSIGSHDPSAHAEIMAIREAGVRIGNYRMLDTVLYSTFEPCAMCAGALVHGRISRLVFGVENPKRGACGSVMDIARHPALNHQLQVDGGVMAAPCNRLLCRFFRWRPAQKNAARDNSSGN

SEQ ID NO: 475 - protein, 167 aa, synthetic construct
MTDSQNDTDEYWMGEALKLAQKARDEGEVPVGAILVRKGEVIGHGWNRSIGSHDPSAHAEIMAIREAGVRIGNYRMLDTVLYSTFEPCAMCAGALVHGRISRLVFGVENPKRGACGSVMDIARHPALNHQLQVDGGVMAAPCNRLLCDFFRWRPAQKNAARDNSSGN

SEQ ID NO: 476 - protein, 962 aa, synthetic construct
MTDSQNDTDEYWMGEALKLAQKAWDEGEVPVGAILVRKGEVIGHGWNRSIGSHDPSAHAEIMAIREAGVRIGNYRMLDTVLYVTLEPCAMCAGALVHGRISRLVFGAENPKTGACGSVMDIARHPALNHQLQVDGGVMAAPCARLLSDFFRWRRAQKKAARDNSSGNGTSGGSSGGSSGSETPGTSESATPESSGGSSGGSMERELVLGIAYGGKYTGLAVVDRRHNQVLYANRLKMRDDVAGILKDRRKQRGIRRTAQTKKKRLRELKNYLKSIGYNESTATFETVYSLAHKRGYDYADMPEEKTSEEIEAMDVEERKQWEKEKQEWEETKRNSRHRKEVVKDVHKAMIEGRATEEQIKRVERIFNKQYRPKRFNNRILTKCKVEDCGVNTPLRKNVRDLLIENIVRFFPIEQSEKDNLKDAVLDKNRREEVKSFFRKHKTDEHIRKQVYDIADNKLSGRTVFCKEHILEHTEHSKEERKVFRLAPSLKTKIENVLAVIKDEILPKFTVNKVVMESNNFDIAAKTQGKKRLAKEEYGKGPREGKETRKEALLRETDGRCIYCGKSIDISNAHDDHIFPRKAGGLNIFANLVACCAVCNENKKGRTPLESGISPKPEIIAFMKNDLKKKILEDARNINTVDFNKYMSHASIGWRYMRDRLRESAGNKKLPIERQSGIYTAYFRRWWGFKKERGNTLHHALDAVILASRKGYSDDGLVDMTLKPKYNKGGEFDPEKHLPEPIEFKMDKGSRGSALHDRNPLSYKKGIITRRFMVTEIECGKEDDVISETYREKLKEAFKRFDTKKGKCLTDKEAKEAGFCIKKNELVMSLKCSIKGTGPGQMIRINNNVFKTNVHNVGVDVYLDEKGKKKAYERKNPRLSKHFIEPPPQPNGRVSFTLKRRDMVTVEGEDAIYRIKKLGTSPTIEAVVGSDGKTRTVSATKLTKANSAELEGSGGSPKKKRKV

SEQ ID NO: 477 - protein, 1589 aa, synthetic construct
MGSSHHHHHHMTDSQNDTDEYWMGEALKLAQKAWDEGEVPVGAILVRKGEVIGHGWNRSIGSHDPSAHAEIMAIREAGVRIGNYRMLDTVLYVTLEPCAMCAGALVHGRISRLVFGAENPKTGACGSVMDIARHPALNHQLQVDGGVMAAPCARLLSDFFRWRRAQKKAARDNSSGNSGGSSGGSSGSETPGTSESATPESSGGSSGGSMDKKYSIGLAIGTNSVGWAVITDEYKVPSKKFKVLGNTDRHSIKKNLIGALLFDSGETAEATRLKRTARRRYTRRKNRICYLQEIFSNEMAKVDDSFFHRLEESFLVEEDKKHERHPIFGNIVDEVAYHEKYPTIYHLRKKLVDSTDKADLRLIYLALAHMIKFRGHFLIEGDLNPDNSDVDKLFIQLVQTYNQLFEENPINASGVDAKAILSARLSKSRRLENLIAQLPGEKKNGLFGNLIALSLGLTPNFKSNFDLAEDAKLQLSKDTYDDDLDNLLAQIGDQYADLFLAAKNLSDAILLSDILRVNTEITKAPLSASMIKRYDEHHQDLTLLKALVRQQLPEKYKEIFFDQSKNGYAGYIDGGASQEEFYKFIKPILEKMDGTEELLVKLNREDLLRKQRTFDNGSIPHQIHLGELHAILRRQEDFYPFLKDNREKIEKILTFRIPYYVGPLARGNSRFAWMTRKSEETITPWNFEEVVDKGASAQSFIERMTNFDKNLPNEKVLPKHSLLYEYFTVYNELTKVKYVTEGMRKPAFLSGEQKKAIVDLLFKTNRKVTVKQLKEDYFKKIECFDSVEISGVEDRFNASLGTYHDLLKIIKDKDFLDNEENEDILEDIVLTLTLFEDREMIEERLKTYAHLFDDKVMKQLKRRRYTGWGRLSRKLINGIRDKQSGKTILDFLKSDGFANRNFMQLIHDDSLTFKEDIQKAQVSGQGDSLHEHIANLAGSPAIKKGILQTVKVVDELVKVMGRHKPENIVIEMARENQTTQKGQKNSRERMKRIEEGIKELGSQILKEHPVENTQLQNEKLYLYYLQNGRDMYVDQELDINRLSDYDVDHIVPQSFLKDDSIDNKVLTRSDKNRGKSDNVPSEEVVKKMKNYWRQLLNAKLITQRKFDNLTKAERGGLSELDKAGFIKRQLVETRQITKHVAQILDSRMNTKYDENDKLIREVKVITLKSKLVSDFRKDFQFYKVREINNYHHAHDAYLNAVVGTALIKKYPKLESEFVYGDYKVYDVRKMIAKSEQEIGKATAKYFFYSNIMNFFKTEITLANGEIRKRPLIETNGETGEIVWDKGRDFATVRKVLSMPQVNIVKKTEVQTGGFSKESILPKRNSDKLIARKKDWDPKKYGGFDSPTVAYSVLVVAKVEKGKSKKLKSVKELLGITIMERSSFEKNPIDFLEAKGYKEVKKDLIIKLPKYSLFELENGRKRMLASAGELQKGNELALPSKYVNFLYLASHYEKLKGSPEDNEQKQLFVEQHKHYLDEIIEQISEFSKRVILADANLDKVLSAYNKHRDKPIREQAENIIHLFTLTNLGAPAAFKYFDTTIDRKRYTSTKEVLDATLIHQSITGLYETRIDLSQLGGDGSGGSPKKKRKV

SEQ ID NO: 478 - protein, 1361 aa, synthetic construct
MGSSHHHHHHGMSSETGPVAVDPTLRRRIEPHEFEVFFDPRELRKETCLLYEINWGGRHSIWRHTSQNTNKHVEVNFIEKFTTERYFCPNTRCSITWFLSWSPCGECSRAITEFLSRYPHVTLFIYIARLYHHADPRNRQGLRDLISSGVTIQIMTEQESGYCWRNFVNYSPSNEAHWPRYPHLWVRLYVLELYCIILGLPPCLNILRRKQPQLTFFTIALQSCHYQRLPPHILWATGLKSGSETPGTSESATPESGMNYVLGLAVGIASVGWAVLELNEEDNPIRIEGLGARIFDKAEVPKTGASLAAPRRMSRGIRRVIRRRRFRLQRVRSYLKKHNILPAEKVDHLYDVPSAIDIYELRKRALTEKVTAEEWARLLIFFAKHRGFKSNRKKASGDADEGEMLKAIAANAEILKNYRTVGEMLCDNEKFRKRKRNRDGAYNFTVSRAMLMEEIHTLFEIQRNLGQKFADEKLEEEYVILFAAQRKFDEGPGENSPYAGNQIEKMIGSCTLEGKKEKRAPKASYAFMAFNLWQKINHLKVNRRGSERFLTEEERRRIADLAWKKEKLTYGSLRKVLSLDPEDRFVGLRYDLKKGKAENLEEPVSEAEKRSFSWVKDYHSIRKALDKVEKNRILKLSHEQLDTIATAFSVYKNEETIEKYLEEGGIGKADGEALLERLSGFSKFGHLSLKACYKLLPFLEKGEVYSRACELAGYDFSKSSLENIDDIPNPVVKRSISQTLKVINAIILRYGNPVEVHIELARELARSFRDRKKMEKGMQENQAKNEKIRQRLISEFGVLRPKGMDIVKFKLCEEQNGECAYSQKHFDMEKLLKDPSYAEVDHIIPYSRSFDDSYNNKVLVLTKENREKRNRIPMEYLADAPERKNRFIHWVKSTIRNSRKRENLLRTDYTATTENEWKRRNLQDTQYISKYLYNYLRHHLVLAKGYTERKRRIIPVNGAVTAYFRKRLGINKIRENGDLHHAVDAVIIACATQGIVNKVSRYSKSRELWDYEVDMETGEVLQKKNKNTKDVFPEPWLNFRYELEQKVRVRPLDIPETADITEMEEPFVSHMPNRKIHGPAHKETIRSGRLKEEGYTISKTALIDLKLTEDKEEIKGYYNKESDRLLYEALKKQLQRYGGKAKEAFKEPFHKPKADGTPGPIVNKVKIMEKSTMLIPVNGGKGLASNGNMVRIDVFRAEEKGKKKYYFIPVYVADTVKEELPNRAVLAHKPYEAWKIMKEENFIFSLYPNDLIFVDAGKEIPFKAALKGSTLDPEKKASRFLMYYKGADIATGSISGVNHDETYKARGVGIQSLREIKKCCIDVLGNISFASKEKRQTFRSGGSSSGGGASSGGSPKKKRKV

SEQ ID NO: 479 - protein, 1441 aa, synthetic construct
MGSSHHHHHHGMSSETGPVAVDPTLRRRIEPHEFEVFFDPRELRKETCLLYEINWGGRHSIWRHTSQNTNKHVEVNFIEKFTTERYFCPNTRCSITWFLSWSPCGECSRAITEFLSRYPHVTLFIYIARLYHHADPRNRQGLRDLISSGVTIQIMTEQESGYCWRNFVNYSPSNEAHWPRYPHLWVRLYVLELYCIILGLPPCLNILRRKQPQLTFFTIALQSCHYQRLPPHILWATGLKSGSETPGTSESATPESGMNYVLGLAVGIASVGWAVLELNEEDNPIRIEGLGARIFDKAEVPKTGASLAAPRRMSRGIRRVIRRRRFRLQRVRSYLKKHNILPAEKVDHLYDVPSAIDIYELRKRALTEKVTAEEWARLLIFFAKHRGFKSNRKKASGDADEGEMLKAIAANAEILKNYRTVGEMLCDNEKFRKRKRNRDGAYNFTVSRAMLMEEIHTLFEIQRNLGQKFADEKLEEEYVILFAAQRKFDEGPGENSPYAGNQIEKMIGSCTLEGKKEKRAPKASYAFMAFNLWQKINHLKVNRRGSERFLTEEERRRIADLAWKKEKLTYGSLRKVLSLDPEDRFVGLRYDLKKGKAENLEEPVSEAEKRSFSWVKDYHSIRKALDKVEKNRILKLSHEQLDTIATAFSVYKNEETIEKYLEEGGIGKADGEALLERLSGFSKFGHLSLKACYKLLPFLEKGEVYSRACELAGYDFSKSSLENIDDIPNPVVKRSISQTLKVINAIILRYGNPVEVHIELARELARSFRDRKKMEKGMQENQAKNEKIRQRLISEFGVLRPKGMDIVKFKLCEEQNGECAYSQKHFDMEKLLKDPSYAEVDHIIPYSRSFDDSYNNKVLVLTKENREKRNRIPMEYLADAPERKNRFIHWVKSTIRNSRKRENLLRTDYTATTENEWKRRNLQDTQYISKYLYNYLRHHLVLAKGYTERKRRIIPVNGAVTAYFRKRLGINKIRENGDLHHAVDAVIIACATQGIVNKVSRYSKSRELWDYEVDMETGEVLQKKNKNTKDVFPEPWLNFRYELEQKVRVRPLDIPETADITEMEEPFVSHMPNRKIHGPAHKETIRSGRLKEEGYTISKTALIDLKLTEDKEEIKGYYNKESDRLLYEALKKQLQRYGGKAKEAFKEPFHKPKADGTPGPIVNKVKIMEKSTMLIPVNGGKGLASNGNMVRIDVFRAEEKGKKKYYFIPVYVADTVKEELPNRAVLAHKPYEAWKIMKEENFIFSLYPNDLIFVDAGKEIPFKAALKGSTLDPEKKASRFLMYYKGADIATGSISGVNHDETYKARGVGIQSLREIKKCCIDVLGNISFASKEKRQTFRSGGSSRTNLSDIIEKETGKQLVIQESILMLPEEVEEVIGNKPESDILVHTAYDESTDENVMLLTSDAPEYKPWALVIQDSNGENKIKMLASSGGSPKKKRKV

SEQ ID NO: 480 - protein, 1442 aa, synthetic construct
MGSSHHHHHHGMSSETGPVAVDPTLRRRIEPHEFEVFFDPRELRKETCLLYEINWGGRHSIWRHTSQNTNKHVEVNFIEKFTTERYFCPNTRCSITWFLSWSPCGECSRAITEFLSRYPHVTLFIYIARLYHHADPRNRQGLRDLISSGVTIQIMTEQESGYCWRNFVNYSPSNEAHWPRYPHLWVRLYVLELYCIILGLPPCLNILRRKQPQLTFFTIALQSCHYQRLPPHILWATGLKSGSETPGTSESATPESGMNYVLGLAVGIASVGWAVLELNEEDNPIRIEGLGARIFDKAEVPKTGASLAAPRRMSRGIRRVIRRRRFRLQRVRSYLKKHNILPAEKVDHLYDVPSAIDIYELRKRALTEKVTAEEWARLLIFFAKHRGFKSNRKKASGDADEGEMLKAIAANAEILKNYRTVGEMLCDNEKFRKRKRNRDGAYNFTVSRAMLMEEIHTLFEIQRNLGQKFADEKLEEEYVILFAAQRKFDEGPGENSPYAGNQIEKMIGSCTLEGKKEKRAPKASYAFMAFNLWQKINHLKVNRRGSERFLTEEERRRIADLAWKKEKLTYGSLRKVLSLDPEDRFVGLRYDLKKGKAENLEEPVSEAEKRSFSWVKDYHSIRKALDKVEKNRILKLSHEQLDTIATAFSVYKNEETIEKYLEEGGIGKADGEALLERLSGFSKFGHLSLKACYKLLPFLEKGEVYSRACELAGYDFSKSSLENIDDIPNPVVKRSISQTLKVINAIILRYGNPVEVHIELARELARSFRDRKKMEKGMQENQAKNEKIRQRLISEFGVLRPKGMDIVKFKLCEEQNGECAYSQKHFDMEKLLKDPSYAEVDHIIPYSRSFDDSYNNKVLVLTKENREKRNRIPMEYLADAPERKNRFIHWVKSTIRNSRKRENLLRTDYTATTENEWKRRNLQDTQYISKYLYNYLRHHLVLAKGYTERKRRIIPVNGAVTAYFRKRLGINKIRENGDLHHAVDAVIIACATQGIVNKVSRYSKSRELWDYEVDMETGEVLQKKNKNTKDVFPEPWLNFRYELEQKVRVRPLDIPETADITEMEEPFVSHMPNRKIHGPAHKETIRSGRLKEEGYTISKTALIDLKLTEDKEEIKGYYNKESDRLLYEALKKQLQRYGGKAKEAFKEPFHKPKADGTPGPIVNKVKIMEKSTMLIPVNGGKGLASNGNMVRIDVFRAEEKGKKKYYFIPVYVADTVKEELPNRAVLAHKPYEAWKIMKEENFIFSLYPNDLIFVDAGKEIPFKAALKGSTLDPEKKASRFLMYYKGADIATGSISGVNHDETYKARGVGIQSLREIKKCCIDVLGNISFASKEKRQTFRSGGSSSKTIKDLEEFAAEKLGYDIVFQESISMEPQEVEHLITTDEKSVLVNSTYDDNKEITISMISTPHPEYRPIALIIQDMEGEVQRKELGSGGSPKKKRKV

SEQ ID NO: 481 - protein, 1443 aa, synthetic construct
MGSSHHHHHHGMSSETGPVAVDPTLRRRIEPHEFEVFFDPRELRKETCLLYEINWGGRHSIWRHTSQNTNKHVEVNFIEKFTTERYFCPNTRCSITWFLSWSPCGECSRAITEFLSRYPHVTLFIYIARLYHHADPRNRQGLRDLISSGVTIQIMTEQESGYCWRNFVNYSPSNEAHWPRYPHLWVRLYVLELYCIILGLPPCLNILRRKQPQLTFFTIALQSCHYQRLPPHILWATGLKSGSETPGTSESATPESGMNYVLGLAVGIASVGWAVLELNEEDNPIRIEGLGARIFDKAEVPKTGASLAAPRRMSRGIRRVIRRRRFRLQRVRSYLKKHNILPAEKVDHLYDVPSAIDIYELRKRALTEKVTAEEWARLLIFFAKHRGFKSNRKKASGDADEGEMLKAIAANAEILKNYRTVGEMLCDNEKFRKRKRNRDGAYNFTVSRAMLMEEIHTLFEIQRNLGQKFADEKLEEEYVILFAAQRKFDEGPGENSPYAGNQIEKMIGSCTLEGKKEKRAPKASYAFMAFNLWQKINHLKVNRRGSERFLTEEERRRIADLAWKKEKLTYGSLRKVLSLDPEDRFVGLRYDLKKGKAENLEEPVSEAEKRSFSWVKDYHSIRKALDKVEKNRILKLSHEQLDTIATAFSVYKNEETIEKYLEEGGIGKADGEALLERLSGFSKFGHLSLKACYKLLPFLEKGEVYSRACELAGYDFSKSSLENIDDIPNPVVKRSISQTLKVINAIILRYGNPVEVHIELARELARSFRDRKKMEKGMQENQAKNEKIRQRLISEFGVLRPKGMDIVKFKLCEEQNGECAYSQKHFDMEKLLKDPSYAEVDHIIPYSRSFDDSYNNKVLVLTKENREKRNRIPMEYLADAPERKNRFIHWVKSTIRNSRKRENLLRTDYTATTENEWKRRNLQDTQYISKYLYNYLRHHLVLAKGYTERKRRIIPVNGAVTAYFRKRLGINKIRENGDLHHAVDAVIIACATQGIVNKVSRYSKSRELWDYEVDMETGEVLQKKNKNTKDVFPEPWLNFRYELEQKVRVRPLDIPETADITEMEEPFVSHMPNRKIHGPAHKETIRSGRLKEEGYTISKTALIDLKLTEDKEEIKGYYNKESDRLLYEALKKQLQRYGGKAKEAFKEPFHKPKADGTPGPIVNKVKIMEKSTMLIPVNGGKGLASNGNMVRIDVFRAEEKGKKKYYFIPVYVADTVKEELPNRAVLAHKPYEAWKIMKEENFIFSLYPNDLIFVDAGKEIPFKAALKGSTLDPEKKASRFLMYYKGADIATGSISGVNHDETYKARGVGIQSLREIKKCCIDVLGNISFASKEKRQTFRSGGSSSKTIKDLEEFAAEKLGYDIVFQESISMEPQEVEHLITTDEKSVLVNSTYDDDKEITISVISTPHPEYRPIALVIQDMEGEVQRKELYGSGGSPKKKRKV

SEQ ID NO: 482 - protein, 1422 aa, synthetic construct
MGSSHHHHHHGMSSETGPVAVDPTLRRRIEPHEFEVFFDPRELRKETCLLYEINWGGRHSIWRHTSQNTNKHVEVNFIEKFTTERYFCPNTRCSITWFLSWSPCGECSRAITEFLSRYPHVTLFIYIARLYHHADPRNRQGLRDLISSGVTIQIMTEQESGYCWRNFVNYSPSNEAHWPRYPHLWVRLYVLELYCIILGLPPCLNILRRKQPQLTFFTIALQSCHYQRLPPHILWATGLKSGSETPGTSESATPESGMNYVLGLAVGIASVGWAVLELNEEDNPIRIEGLGARIFDKAEVPKTGASLAAPRRMSRGIRRVIRRRRFRLQRVRSYLKKHNILPAEKVDHLYDVPSAIDIYELRKRALTEKVTAEEWARLLIFFAKHRGFKSNRKKASGDADEGEMLKAIAANAEILKNYRTVGEMLCDNEKFRKRKRNRDGAYNFTVSRAMLMEEIHTLFEIQRNLGQKFADEKLEEEYVILFAAQRKFDEGPGENSPYAGNQIEKMIGSCTLEGKKEKRAPKASYAFMAFNLWQKINHLKVNRRGSERFLTEEERRRIADLAWKKEKLTYGSLRKVLSLDPEDRFVGLRYDLKKGKAENLEEPVSEAEKRSFSWVKDYHSIRKALDKVEKNRILKLSHEQLDTIATAFSVYKNEETIEKYLEEGGIGKADGEALLERLSGFSKFGHLSLKACYKLLPFLEKGEVYSRACELAGYDFSKSSLENIDDIPNPVVKRSISQTLKVINAIILRYGNPVEVHIELARELARSFRDRKKMEKGMQENQAKNEKIRQRLISEFGVLRPKGMDIVKFKLCEEQNGECAYSQKHFDMEKLLKDPSYAEVDHIIPYSRSFDDSYNNKVLVLTKENREKRNRIPMEYLADAPERKNRFIHWVKSTIRNSRKRENLLRTDYTATTENEWKRRNLQDTQYISKYLYNYLRHHLVLAKGYTERKRRIIPVNGAVTAYFRKRLGINKIRENGDLHHAVDAVIIACATQGIVNKVSRYSKSRELWDYEVDMETGEVLQKKNKNTKDVFPEPWLNFRYELEQKVRVRPLDIPETADITEMEEPFVSHMPNRKIHGPAHKETIRSGRLKEEGYTISKTALIDLKLTEDKEEIKGYYNKESDRLLYEALKKQLQRYGGKAKEAFKEPFHKPKADGTPGPIVNKVKIMEKSTMLIPVNGGKGLASNGNMVRIDVFRAEEKGKKKYYFIPVYVADTVKEELPNRAVLAHKPYEAWKIMKEENFIFSLYPNDLIFVDAGKEIPFKAALKGSTLDPEKKASRFLMYYKGADIATGSISGVNHDETYKARGVGIQSLREIKKCCIDVLGNISFASKEKRQTFRSGGSSIVRVTYNVEQEVEISNKFNKDVDIMKPEEYDDYIDDLMFALNEKLPEYAEISCVINDNTGEVLFEGGSGGSPKKKRKV

SEQ ID NO: 483 - DNA, 10943 bp, synthetic construct
  source 1..10943: mol_type = other DNA
gaaataattttgtttaactttaagaaggagatataccatgggcagcagtcatcatcatcaccatcacatgtctgaagtcgaatttagccacgaatactggatgcgtcacgcgctgacgctggcgaaacgtgcctgggatgagcgggaagtgccggtcggcgcggtattagtgcataacaatcgggtaatcggcgaaggctggaaccgcccgattggtcgccatgatcccaccgcacatgcagaaatcatggccctgcggcagggtggtctggtgatgcaaaattatcgtctgatcgacgccacgttgtatgtcacgcttgaaccatgtgtaatgtgtgccggagcgatgatccacagtcgcattggtcgcgtggtctttggtgcgcgtgacgcgaaaactggcgctgcgggatctttaatggatgtgctgcatcatccgggtatgaatcaccgagtggaaattacggaaggaatactggcggatgagtgcgcggcgttgctcagtgacttctttcgcatgcgccgccaggaaattaaagcgcagaaaaaagcgcaatcctcgacggattcaggcgggtcgtcgggaggaagcagtggcagcgagactcccggaacttcggagagcgctacaccagaaagtagtggaggcagctctggtgggtccatggataagaaatactcaataggactggcgattggcacaaatagcgtcggatgggctgtgatcactgatgaatataaggttccttctaaaaagttcaaggttctgggaaatacagaccgccacagtatcaaaaaaaatcttataggggctcttctgtttgacagtggagagacagccgaagctactagactcaaacggacagctaggagaaggtatacaagacggaagaataggatttgttatctccaggagattttttcaaatgagatggccaaagtggatgatagtttctttcatagacttgaagagtcttttttggtggaagaagacaagaagcatgaaagacatcctatttttggaaatatagtggatgaagttgcttatcacgagaaatatccaactatctatcatctgagaaaaaaattggtggattctactgataaagccgatttgcgcctgatctatttggccctggcccacatgattaagtttagaggtcattttttgattgagggcgatctgaatcctgataatagtgatgtggacaaactgtttatccagttggtgcaaacctacaatcaactgtttgaagaaaaccctattaacgcaagtggagtggatgctaaagccattctttctgcaagattgagtaaatcaagaagactggaaaatctcattgctcagctccccggtgagaagaaaaatggcctgtttgggaatctcattgctttgtcattgggtttgacccctaattttaaatcaaattttgatttggcagaagatgctaaactccagctttcaaaagatacttacgatgatgatctggataatctgttggctcaaattggagatcaatatgctgatttgtttttggcagctaagaatctgtcagatgctattctgctttcagacatcctgagagtgaatactgaaataactaaggctcccctgtcagcttcaatgattaaacgctacgatgaacatcatcaagacttgactcttctgaaagccctggttagacaacaacttccagaaaagtataaagaaatcttttttgatcaatcaaaaaacggatatgcaggttatattgatggcggcgcaagccaagaagaattttataaatttatcaaaccaattctggaaaaaatggatggtactgaggaactgttggtgaaactgaatagagaagatttgctgcgcaagcaacggacctttgacaacggctctattccccatcaaattcacttgggtgagctgcatgctattttgagaagacaagaagacttttatccatttctgaaagacaatagagagaagattgaaaaaatcttgacttttaggattccttattatgttggtccattggccagaggcaatagtaggtttgcatggatgactcggaagtctgaagaaacaattaccccatggaattttgaagaagttgtcgataaaggtgcttcagctcaatcatttattgaacgcatgacaaactttgataaaaatcttccaaatgaaaaagtgctgccaaaacatagtttgctttatgagtattttaccgtttataacgaattgacaaaggtcaaatatgttactgaaggaatgagaaaaccagcatttctttcaggtgaacagaagaaagccattgttgatctgctcttcaaaacaaataggaaagtgaccgttaagcaactgaaagaagattatttcaaaaaaatagaatgttttgatagtgttgaaatttcaggagttgaagatagatttaatgcttcactgggtacataccatgatttgctgaaaattattaaagataaagattttttggataatgaagaaaatgaagacatcctggaggatattgttctgacattgaccctgtttgaagatagggagatgattgaggaaagacttaaaacatacgctcacctctttgatgataaggtgatgaaacagcttaaaagacgcagatatactggttggggaaggttgtccagaaaattgattaatggtattagggataagcaatctggcaaaacaatactggattttttgaaatcagatggttttgccaatcgcaattttatgcagctcatccatgatgatagtttgacatttaaagaagacatccaaaaagcacaagtgtctggacaaggcgatagtctgcatgaacatattgcaaatctggctggtagccctgctattaaaaaaggtattctccagactgtgaaagttgttgatgaattggtcaaagtgatggggcggcataagccagaaaatatcgttattgaaatggcaagagaaaatcagacaactcaaaagggccagaaaaattccagagagaggatgaaaagaatcgaagaaggtatcaaagaactgggaagtcagattcttaaagagcatcctgttgaaaatactcaattgcaaaatgaaaagctctatctctattatctccaaaatggaagagatatgtatgtggaccaagaactggatattaataggctgagtgattatgatgtcgatcacattgttccacaaagtttccttaaagacgattcaatagacaataaggtcctgaccaggtctgataaaaatagaggtaaatccgataacgttccaagtgaagaagtggtcaaaaagatgaaaaactattggagacaacttctgaacgccaagctgatcactcaaaggaagtttgataatctgaccaaagctgaaagaggaggtttgagtgaacttgataaagctggttttatcaaacgccaattggttgaaactcgccaaatcactaagcatgtggcacaaattttggatagtcgcatgaatactaaatacgatgaaaatgataaacttattagagaggttaaagtgattaccctgaaatctaaactggtttctgacttcagaaaagatttccaattctataaagtgagagagattaacaattaccatcatgcccatgatgcctatctgaatgccgtcgttggaactgctttgattaagaaatatccaaaacttgaaagcgagtttgtctatggtgattataaagtttatgatgttaggaaaatgattgctaagtctgagcaagaaataggcaaagcaaccgcaaagtatttcttttactctaatatcatgaacttcttcaaaacagaaattacacttgcaaatggagagattcgcaaacgccctctgatcgaaactaatggggaaactggagaaattgtctgggataaagggagagattttgccacagtgcgcaaagtgttgtccatgccccaagtcaatatcgtcaagaaaacagaagtgcagacaggcggattctctaaggagtcaattctgccaaaaagaaattccgacaagctgattgctaggaaaaaagactgggacccaaaaaaatatggtggttttgatagtccaaccgtggcttattcagtcctggtggttgctaaggtggaaaaagggaaatccaagaagctgaaatccgttaaagagctgctggggatcacaattatggaaagaagttcctttgaaaaaaatcccattgactttctggaagctaaaggatataaggaagttaaaaaagacctgatcattaaactgcctaaatatagtctttttgagctggaaaacggtaggaaacggatgctggctagtgccggagaactgcaaaaaggaaatgagctggctctgccaagcaaatatgtgaattttctgtatctggctagtcattatgaaaagttgaagggtagtccagaagataacgaacaaaaacaattgtttgtggagcagcataagcattatctggatgagattattgagcaaatcagtgaattttctaagagagttattctggcagatgccaatctggataaagttcttagtgcatataacaaacatagagacaaaccaataagagaacaagcagaaaatatcattcatctgtttaccttgaccaatcttggagcacccgctgcttttaaatactttgatacaacaattgataggaaaagatatacctctacaaaagaagttctggatgccactcttatccatcaatccatcactggtctttatgaaacacgcattgatttgagtcagctgggaggtgacggctctggcgggtctcccaagaagaagaggaaagtctaagatccggctgctaacaaagcccgaaaggaagctgagttggctgctgccaccgctgagcaataactagcataaccccttggggcctctaaacgggtcttgaggggttttttgctgaaaggaggaactatatccggattggcgaatgggacgcgccctgtagcggcgcattaagcgcggcgggtgtggtggttacgcgcagcgtgaccgctacacttgccagcgccctagcgcccgctcctttcgctttcttcccttcctttctcgccacgttcgccggctttccccgtcaagctctaaatcgggggctccctttagggttccgatttagtgctttacggcacctcgaccccaaaaaacttgattagggtgatggttcacgtagtgggccatcgccctgatagacggtttttcgccctttgacgttggagtccacgttctttaatagtggactcttgttccaaactggaacaacactcaaccctatctcggtctattcttttgatttataagggattttgccgatttcggcctattggttaaaaaatgagctgatttaacaaaaatttaacgcgaattttaacaaaatattaacgcttacaatttaggtggcacttttcggggaaatgtgcgcggaacccctatttgtttatttttctaaatacattcaaatatgtatccgctcatgagacaataaccctgataaatgcttcaataatattgaaaaaggaagagtatgagtattcaacatttccgtgtcgcccttattcccttttttgcggcattttgccttcctgtttttgctcacccagaaacgctggtgaaagtaaaagatgctgaagatcagttgggtgcacgagtgggttacatcgaactggatctcaacagcggtaagatccttgagagttttcgccccgaagaacgttttccaatgatgagcacttttaaagttctgctatgtggcgcggtattatcccgtattgacgccgggcaagagcaactcggtcgccgcatacactattctcagaatgacttggttgagtactcaccagtcacagaaaagcatcttacggatggcatgacagtaagagaattatgcagtgctgccataaccatgagtgataacactgcggccaacttacttctgacaacgatcggaggaccgaaggagctaaccgcttttttgcacaacatgggggatcatgtaactcgccttgatcgttgggaaccggagctgaatgaagccataccaaacgacgagcgtgacaccacgatgcctgcagcaatggcaacaacgttgcgcaaactattaactggcgaactacttactctagcttcccggcaacaattaatagactggatggaggcggataaagttgcaggaccacttctgcgctcggcccttccggctggctggtttattgctgataaatctggagccggtgagcgtgggtctcgcggtatcattgcagcactggggccagatggtaagccctcccgtatcgtagttatctacacgacggggagtcaggcaactatggatgaacgaaatagacagatcgctgagataggtgcctcactgattaagcattggtaactgtcagaccaagtttactcatatatactttagattgatttaaaacttcatttttaatttaaaaggatctaggtgaagatcctttttgataatctcatgaccaaaatcccttaacgtgagttttcgttccactgagcgtcagaccccgtagaaaagatcaaaggatcttcttgagatcctttttttctgcgcgtaatctgctgcttgcaaacaaaaaaaccaccgctaccagcggtggtttgtttgccggatcaagagctaccaactctttttccgaaggtaactggcttcagcagagcgcagataccaaatactgtccttctagtgtagccgtagttaggccaccacttcaagaactctgtagcaccgcctacatacctcgctctgctaatcctgttaccagtggctgctgccagtggcgataagtcgtgtcttaccgggttggactcaagacgatagttaccggataaggcgcagcggtcgggctgaacggggggttcgtgcacacagcccagcttggagcgaacgacctacaccgaactgagatacctacagcgtgagctatgagaaagcgccacgcttcccgaagggagaaaggcggacaggtatccggtaagcggcagggtcggaacaggagagcgcacgagggagcttccagggggaaacgcctggtatctttatagtcctgtcgggtttcgccacctctgacttgagcgtcgatttttgtgatgctcgtcaggggggcggagcctatggaaaaacgccagcaacgcggcctttttacggttcctggccttttgctggccttttgctcacatgttctttcctgcgttatcccctgattctgtggataaccgtattaccgcctttgagtgagctgataccgctcgccgcagccgaacgaccgagcgcagcgagtcagtgagcgaggaagcggaagagcgcctgatgcggtattttctccttacgcatctgtgcggtatttcacaccgcaatggtgcactctcagtacaatctgctctgatgccgcatagttaagccagtatacactccgctatcgctacgtgactgggtcatggctgcgccccgacacccgccaacacccgctgacgcgccctgacgggcttgtctgctcccggcatccgcttacagacaagctgtgaccgtctccgggagctgcatgtgtcagaggttttcaccgtcatcaccgaaacgcgcgaggcagctgcggtaaagctcatcagcgtggtcgtgaagcgattcacagatgtctgcctgttcatccgcgtccagctcgttgagtttctccagaagcgttaatgtctggcttctgataaagcgggccatgttaagggcggttttttcctgtttggtcactgatgcctccgtgtaagggggatttctgttcatgggggtaatgataccgatgaaacgagagaggatgctcacgatacgggttactgatgatgaacatgcccggttactggaacgttgtgagggtaaacaactggcggtatggatgcggcgggaccagagaaaaatcactcagggtcaatgccagcgcttcgttaatacagatgtaggtgttccacagggtagccagcagcatcctgcgatgcagatccggaacataatggtgcagggcgctgacttccgcgtttccagactttacgaaacacggaaaccgaagaccattcatgttgttgctcaggtcgcagacgttttgcagcagcagtcgcttcacgttcgctcgcgtatcggtgattcattctgctaaccagtaaggcaaccccgccagcctagccgggtcctcaacgacaggagcacgatcatgcgcacccgtggggccgccatgccggcgataatggcctgcttctcgccgaaacgtttggtggcgggaccagtgacgaaggcttgagcgagggcgtgcaagattccgaataccgcaagcgacaggccgatcatcgtcgcgctccagcgaaagcggtcctcgccgaaaatgacccagagcgctgccggcacctgtcctacgagttgcatgataaagaagacagtcataagtgcggcgacgatagtcatgccccgcgcccaccggaaggagctgactgggttgaaggctctcaagggcatcggtcgagatcccggtgcctaatgagtgagctaacttacattaattgcgttgcgctcactgcccgctttccagtcgggaaacctgtcgtgccagctgcattaatgaatcggccaacgcgcggggagaggcggtttgcgtattgggcgccagggtggtttttcttttcaccagtgagacgggcaacagctgattgcccttcaccgcctggccctgagagagttgcagcaagcggtccacgctggtttgccccagcaggcgaaaatcctgtttgatggtggttaacggcgggatataacatgagctgtcttcggtatcgtcgtatcccactaccgagatatccgcaccaacgcgcagcccggactcggtaatggcgcgcattgcgcccagcgccatctgatcgttggcaaccagcatcgcagtgggaacgatgccctcattcagcatttgcatggtttgttgaaaaccggacatggcactccagtcgccttcccgttccgctatcggctgaatttgattgcgagtgagatatttatgccagccagccagacgcagacgcgccgagacagaacttaatgggcccgctaacagcgcgatttgctggtgacccaatgcgaccagatgctccacgcccagtcgcgtaccgtcttcatgggagaaaataatactgttgatgggtgtctggtcagagacatcaagaaataacgccggaacattagtgcaggcagcttccacagcaatggcatcctggtcatccagcggatagttaatgatcagcccactgacgcgttgcgcgagaagattgtgcaccgccgctttacaggcttcgacgccgcttcgttctaccatcgacaccaccacgctggcacccagttgatcggcgcgagatttaatcgccgcgacaatttgcgacggcgcgtgcagggccagactggaggtggcaacgccaatcagcaacgactgtttgcccgccagttgttgtgccacgcggttgggaatgtaattcagctccgccatcgccgcttccactttttcccgcgttttcgcagaaacgtggctggcctggttcaccacgcgggaaacggtctgataagagacaccggcatactctgcgacatcgtataacgttactggtttcacattcaccaccctgaattgactctcttccgggcgctatcatgccataccgcgaaaggttttgcgccattcgatggtgtccgggatctcgacgctctcccttatgcgactcctgcattaggaagcagcccagtagtaggttgaggccgttgagcaccgccgccgcaaggaatggtttaattaatttgatcggcacgtaagaggttccaactttcaccataatgaaataagatcactaccgggcgtattttttgagttatcgagattttcaggagctaaggaagctaaaatggagaaaaaaatcactggatataccaccgttgatatatcccaatggcatcgtaaagaacattttgaggcatttcagtcagttgctcaatgtacctataaccagaccgttcagctggatattacggcctttttaaagaccgtaaagaaaaataagcacaagttttatccggcctttattcacattcttgcccgcctgatgaatgctcatccggaattccgtatggcaatgaaagacggtgagctggtgatatgggatagtgttcacccttgttacaccgttttccatgagcaaactgaaacgttttcatcgctctggagtgaataccacgacgatttccggcagtttctacacatatattcgcaagatgtggcgtgttacggtgaaaacctggcctatttccctaaagggtttattgagaatatgttttttgtctcagccaatccctgggtgagtttcaccagttttgatttaaacgtggccaatatggacaacttcttcgcccccgttttcaccatgggcaaatattatacgcaaggcgacaaggtgctgatgccgctggcgattcaggttcattatgccgtctgtgatggcttccatgtcggcagaatgcttaatgaattacaacagtactgcgatgagtggcagggcggggcgtaatttttttaaggcagttattggtgcccttaaacgcctggtgctacgcctgaataagtgaagcatgcaaggagatggcgcccaacagtcccccggccacggggcctgccaccatacccacgccgaaacaagcgctcatgagcccgaagtggcgagcccgatcttccccatcggtgatgtcggcgatataggcgccagcaaccgcacctgtggcgccggtgatgccggccacgatgcgtccggcgtagaggatcgagatctcgatcccgcgaaattaatacgactcactataggggaattgtgagcggataacaattcccctctaggatcc

SEQ ID NO: 484 - DNA, 8520 bp, synthetic construct
  source 1..8520: mol_type = other DNA
gaaataattttgtttaactttaagaaggagatataccatgggcagcagtcatcatcatcaccatcactccgaggttgaatttagtcatgaatattggatgcgccacgcgctgacgttagccaaacgtgctcgtgatgagcgcgaagttccagtcggggccgtcttggtccttaacaatcgtgtcattggcgaggggtggaaccgcgctattgggctgcacgatccaacagcgcatgctgagattatggccttgcgtcaaggagggttagtaatgcaaaactaccgtcttattgatgctacgttatactctacattcgaaccctgtgtaatgtgtgcaggagcgatgatccacagtcgtattggccgcgtagtatttggtgtacgcaatgctaaaactggagccgccggatcgttgatggatgtcttgcattaccctggaatgaaccatcgtgtagagatcactgaaggcatccttgccgatgagtgtgcggctttgctttgctatttcttccgtatgccacgtcgtgtttttaacgcccaaaaaaaggctcaatccagtaccgattcaggcgggtcgtcgggaggaagcagtggcagcgagactcccggaacttcggagagcgctacaccagaaagtagtggaggcagctctggtgggtccatggagcgcgagctggtgctggggatcgcgtatggtggtaagtacacgggcttggcggtggtggatcgccgccacaaccaagtgctgtacgcgaatcgtcttaaaatgcgtgatgacgtggcaggcatcttgaaggaccgtcgcaaacagcgcgggattcgtcgcacggcccagacgaagaagaaacgccttcgcgagctgaagaattacctgaagagcatcgggtacaatgagtcgacggccaccttcgagaccgtgtattcactggcgcacaagcgtggttacgactacgcagacatgccagaggagaaaaccagtgaggagattgaagcgatggacgttgaggaacgtaagcaatgggagaaggaaaagcaagagtgggaagaaactaagcgcaactctcgccatcgcaaagaggtagttaaggacgtacacaaggcgatgatcgagggccgtgccacggaagaacaaattaagcgtgtggagcgcatcttcaacaagcaatatcgcccgaagcgttttaacaaccgcatcttgaccaagtgcaaagtggaagactgtggtgtgaacactcctttgcgtaagaacgtacgcgacctgctgattgagaacattgttcgtttctttccgattgagcagagcgagaaagacaacctgaaggacgccgtattagacaagaatcgtcgcgaagaggtgaagtccttctttcgcaagcacaaaaccgacgagcacatccgtaaacaagtgtacgacattgccgacaataaactgagcgggcgtactgtattctgcaaggagcacattctggagcacacggaacactccaaggaagagcgtaaagtctttcgcctggcaccgagtctgaagacgaagattgaaaacgtgctggcagtaatcaaggatgaaattctccctaagttcacggtgaacaaagtagtgatggaatcaaataacttcgacatcgccgcgaagacccaaggtaagaagcgtctcgccaaggaagagtacggcaagggcccgcgtgagggtaaggaaacgcgcaaagaggcgctgctgcgcgagaccgacgggcgctgcatttattgcggcaagagcatcgatatttcgaacgcacacgacgatcacatcttccctcgtaaagcgggcggattgaacattttcgcgaacctcgtggcctgctgtgcggtgtgcaacgaaaacaagaagggccgcacgcctctggagtcgggcatttcaccaaagccagagattattgcatttatgaagaacgacctgaagaagaaaatcttggaagatgctcgcaacattaacaccgtcgacttcaacaagtatatgagccacgcttcgattgggtggcgttacatgcgcgatcgccttcgcgaatcggcaggtaacaagaaactgccgatcgaacgccaaagtggtatttatacggcctactttcgtcgctggtggggtttcaagaaagagcgcggtaatactttgcaccacgctctggacgcggtgattttggcctcgcgtaagggctactcagacgacggcttagtagacatgactttaaaacccaagtacaataagggcggcgaattcgatccggagaagcacttaccggagcctatcgagttcaagatggacaaggggtcacgcggtagcgccctgcacgaccgtaatccgttgagttacaagaagggtatcatcactcgtcgcttcatggtcactgaaatcgaatgtggcaaggaagatgacgtgatctctgaaacctaccgcgagaagttgaaggaagcgttcaagcgcttcgacaccaagaagggcaagtgcctgaccgataaagaagccaaagaggcggggttctgtatcaagaagaacgagctggtgatgtcgctgaagtgttcaatcaaggggactggcccgggccaaatgattcgcattaacaacaacgtgttcaaaaccaacgtacacaacgtaggagttgacgtctacctggacgagaagggcaagaagaaggcgtacgaacgcaagaacccacgcttatcgaagcattttattgagccgccgccacaaccgaacggccgcgtctctttcacactgaagcgtcgcgacatggtgactgtagagggagaggatgccatttaccgcattaagaagttgggtacttccccgaccatcgaggcggtggtggggagcgacggtaagacgcgcacagtatcggcaacgaaattgaccaaggccaatagcgccgagctcgagggctctggcgggtctcccaagaagaagaggaaagtctaagatccggctgctaacaaagcccgaaaggaagctgagttggctgctgccaccgctgagcaataactagcataaccccttggggcctctaaacgggtcttgaggggttttttgctgaaaggaggaactatatccggattggcgaatgggacgcgccctgtagcggcgcattaagcgcggcgggtgtggtggttacgcgcagcgtgaccgctacacttgccagcgccctagcgcccgctcctttcgctttcttcccttcctttctcgccacgttcgccggctttccccgtcaagctctaaatcgggggctccctttagggttccgatttagtgctttacggcacctcgaccccaaaaaacttgattagggtgatggttcacgtagtgggccatcgccctgatagacggtttttcgccctttgacgttggagtccacgttctttaatagtggactcttgttccaaactggaacaacactcaaccctatctcggtctattcttttgatttataagggattttgccgatttcggcctattggttaaaaaatgagctgatttaacaaaaatttaacgcgaattttaacaaaatattaacgcttacaatttaggtggcacttttcggggaaatgtgcgcggaacccctatttgtttatttttctaaatacattcaaatatgtatccgctcatgagacaataaccctgataaatgcttcaataatattgaaaaaggaagagtatgagtattcaacatttccgtgtcgcccttattcccttttttgcggcattttgccttcctgtttttgctcacccagaaacgctggtgaaagtaaaagatgctgaagatcagttgggtgcacgagtgggttacatcgaactggatctcaacagcggtaagatccttgagagttttcgccccgaagaacgttttccaatgatgagcacttttaaagttctgctatgtggcgcggtattatcccgtattgacgccgggcaagagcaactcggtcgccgcatacactattctcagaatgacttggttgagtactcaccagtcacagaaaagcatcttacggatggcatgacagtaagagaattatgcagtgctgccataaccatgagtgataacactgcggccaacttacttctgacaacgatcggaggaccgaaggagctaaccgcttttttgcacaacatgggggatcatgtaactcgccttgatcgttgggaaccggagctgaatgaagccataccaaacgacgagcgtgacaccacgatgcctgcagcaatggcaacaacgttgcgcaaactattaactggcgaactacttactctagcttcccggcaacaattaatagactggatggaggcggataaagttgcaggaccacttctgcgctcggcccttccggctggctggtttattgctgataaatctggagccggtgagcgtgggtctcgcggtatcattgcagcactggggccagatggtaagccctcccgtatcgtagttatctacacgacggggagtcaggcaactatggatgaacgaaatagacagatcgctgagataggtgcctcactgattaagcattggtaactgtcagaccaagtttactcatatatactttagattgatttaaaacttcatttttaatttaaaaggatctaggtgaagatcctttttgataatctcatgaccaaaatcccttaacgtgagttttcgttccactgagcgtcagaccccgtagaaaagatcaaaggatcttcttgagatcctttttttctgcgcgtaatctgctgcttgcaaacaaaaaaaccaccgctaccagcggtggtttgtttgccggatcaagagctaccaactctttttccgaaggtaactggcttcagcagagcgcagataccaaatactgtccttctagtgtagccgtagttaggccaccacttcaagaactctgtagcaccgcctacatacctcgctctgctaatcctgttaccagtggctgctgccagtggcgataagtcgtgtcttaccgggttggactcaagacgatagttaccggataaggcgcagcggtcgggctgaacggggggttcgtgcacacagcccagcttggagcgaacgacctacaccgaactgagatacctacagcgtgagctatgagaaagcgccacgcttcccgaagggagaaaggcggacaggtatccggtaagcggcagggtcggaacaggagagcgcacgagggagcttccagggggaaacgcctggtatctttatagtcctgtcgggtttcgccacctctgacttgagcgtcgatttttgtgatgctcgtcaggggggcggagcctatggaaaaacgccagcaacgcggcctttttacggttcctggccttttgctggccttttgctcacatgttctttcctgcgttatcccctgattctgtggataaccgtattaccgcctttgagtgagctgataccgctcgccgcagccgaacgaccgagcgcagcgagtcagtgagcgaggaagcggaagagcgcctgatgcggtattttctccttacgcatctgtgcggtatttcacaccgcaatggtgcactctcagtacaatctgctctgatgccgcatagttaagccagtatacactccgctatcgctacgtgactgggtcatggctgcgccccgacacccgccaacacccgctgacgcgccctgacgggcttgtctgctcccggcatccgcttacagacaagctgtgaccgtctccgggagctgcatgtgtcagaggttttcaccgtcatcaccgaaacgcgcgaggcagctgcggtaaagctcatcagcgtggtcgtgaagcgattcacagatgtctgcctgttcatccgcgtccagctcgttgagtttctccagaagcgttaatgtctggcttctgataaagcgggccatgttaagggcggttttttcctgtttggtcactgatgcctccgtgtaagggggatttctgttcatgggggtaatgataccgatgaaacgagagaggatgctcacgatacgggttactgatgatgaacatgcccggttactggaacgttgtgagggtaaacaactggcggtatggatgcggcgggaccagagaaaaatcactcagggtcaatgccagcgcttcgttaatacagatgtaggtgttccacagggtagccagcagcatcctgcgatgcagatccggaacataatggtgcagggcgctgacttccgcgtttccagactttacgaaacacggaaaccgaagaccattcatgttgttgctcaggtcgcagacgttttgcagcagcagtcgcttcacgttcgctcgcgtatcggtgattcattctgctaaccagtaaggcaaccccgccagcctagccgggtcctcaacgacaggagcacgatcatgcgcacccgtggggccgccatgccggcgataatggcctgcttctcgccgaaacgtttggtggcgggaccagtgacgaaggcttgagcgagggcgtgcaagattccgaataccgcaagcgacaggccgatcatcgtcgcgctccagcgaaagcggtcctcgccgaaaatgacccagagcgctgccggcacctgtcctacgagttgcatgataaagaagacagtcataagtgcggcgacgatagtcatgccccgcgcccaccggaaggagctgactgggttgaaggctctcaagggcatcggtcgagatcccggtgcctaatgagtgagctaacttacattaattgcgttgcgctcactgcccgctttccagtcgggaaacctgtcgtgccagctgcattaatgaatcggccaacgcgcggggagaggcggtttgcgtattgggcgccagggtggtttttcttttcaccagtgagacgggcaacagctgattgcccttcaccgcctggccctgagagagttgcagcaagcggtccacgctggtttgccccagcaggcgaaaatcctgtttgatggtggttaacggcgggatataacatgagctgtcttcggtatcgtcgtatcccactaccgagatatccgcaccaacgcgcagcccggactcggtaatggcgcgcattgcgcccagcgccatctgatcgttggcaaccagcatcgcagtgggaacgatgccctcattcagcatttgcatggtttgttgaaaaccggacatggcactccagtcgccttcccgttccgctatcggctgaatttgattgcgagtgagatatttatgccagccagccagacgcagacgcgccgagacagaacttaatgggcccgctaacagcgcgatttgctggtgacccaatgcgaccagatgctccacgcccagtcgcgtaccgtcttcatgggagaaaataatactgttgatgggtgtctggtcagagacatcaagaaataacgccggaacattagtgcaggcagcttccacagcaatggcatcctggtcatccagcggatagttaatgatcagcccactgacgcgttgcgcgagaagattgtgcaccgccgctttacaggcttcgacgccgcttcgttctaccatcgacaccaccacgctggcacccagttgatcggcgcgagatttaatcgccgcgacaatttgcgacggcgcgtgcagggccagactggaggtggcaacgccaatcagcaacgactgtttgcccgccagttgttgtgccacgcggttgggaatgtaattcagctccgccatcgccgcttccactttttcccgcgttttcgcagaaacgtggctggcctggttcaccacgcgggaaacggtctgataagagacaccggcatactctgcgacatcgtataacgttactggtttcacattcaccaccctgaattgactctcttccgggcgctatcatgccataccgcgaaaggttttgcgccattcgatggtgtccgggatctcgacgctctcccttatgcgactcctgcattaggaagcagcccagtagtaggttgaggccgttgagcaccgccgccgcaaggaatggtttaattaattacggccagtcatgcataatccgcacgcatctggaataaggaagtgccattccgcctgaccttaatacgactcactatagtctttatggcagggtgaaacgcgttacagttaagaaattaattgtaaaacgcctatacagtgaagggatatacgcttgggtttgtccagcctgagcctctatgccagaaatggcgccttcatcgtgggttaggacatttaattttaaaaaaaaaccccgcttcggcggggtttttttttagcatgcaaggagatggcgcccaacagtcccccggccacggggcctgccaccatacccacgccgaaacaagcgctcatgagcccgaagtggcgagcccgatcttccccatcggtgatgtcggcgatataggcgccagcaaccgcacctgtggcgccggtgatgccggccacgatgcgtccggcgtagaggatcgagatctcgatcccgcgaaattaatacgactcactataggggaattgtgagcggataacaattcccctctaggatcc

SEQ ID NO: 485 - DNA, 8925 bp, synthetic construct
  source 1..8925: mol_type = other DNA
atgggcagcagtcatcatcatcaccatcacatgtcgtctgagaccgggcctgttgccgtggaccctacccttcgccgccgtatcgaaccacacgagtttgaagtgttttttgacccacgcgaactgcgcaaagagacttgtttgctttacgagattaactggggaggccgtcactccatctggcgtcacacttcacaaaatactaataagcacgttgaggttaatttcattgagaaatttactacagagcgctacttctgtccgaatacacgttgcagcatcacctggtttctttcctggtccccgtgcggtgaatgttcacgtgccatcaccgaattcttatcgcgctaccctcacgtaactttgtttatctatattgcccgtttatatcaccatgcagaccctcgcaatcgtcagggcctgcgcgaccttatctcgagtggagtcaccatccaaattatgactgaacaggaatcggggtattgttggcgcaactttgtcaattattctccgagcaacgaggcacattggccgcgttacccacacttatgggtgcgcctttacgtgctggaattgtattgcatcattcttggtcttcccccatgtttgaatatccttcgccgcaaacagcctcagttgacgttttttacgattgctcttcagtcctgtcactaccaacgtcttcccccgcacatcctgtgggcgaccggtttgaaatcggggagtgaaacacccggcacatccgaaagtgcgacacctgaatctgccatggagcgcgagctggtgctggggatcgcgtatggtggtaagtacacgggcttggcggtggtggatcgccgccacaaccaagtgctgtacgcgaatcgtcttaaaatgcgtgatgacgtggcaggcatcttgaaggaccgtcgcaaacagcgcgggattcgtcgcacggcccagacgaagaagaaacgccttcgcgagctgaagaattacctgaagagcatcgggtacaatgagtcgacggccaccttcgagaccgtgtattcactggcgcacaagcgtggttacgactacgcagacatgccagaggagaaaaccagtgaggagattgaagcgatggacgttgaggaacgtaagcaatgggagaaggaaaagcaagagtgggaagaaactaagcgcaactctcgccatcgcaaagaggtagttaaggacgtacacaaggcgatgatcgagggccgtgccacggaagaacaaattaagcgtgtggagcgcatcttcaacaagcaatatcgcccgaagcgttttaacaaccgcatcttgaccaagtgcaaagtggaagactgtggtgtgaacactcctttgcgtaagaacgtacgcgacctgctgattgagaacattgttcgtttctttccgattgagcagagcgagaaagacaacctgaaggacgccgtattagacaagaatcgtcgcgaagaggtgaagtccttctttcgcaagcacaaaaccgacgagcacatccgtaaacaagtgtacgacattgccgacaataaactgagcgggcgtactgtattctgcaaggagcacattctggagcacacggaacactccaaggaagagcgtaaagtctttcgcctggcaccgagtctgaagacgaagattgaaaacgtgctggcagtaatcaaggatgaaattctccctaagttcacggtgaacaaagtagtgatggaatcaaataacttcgacatcgccgcgaagacccaaggtaagaagcgtctcgccaaggaagagtacggcaagggcccgcgtgagggtaaggaaacgcgcaaagaggcgctgctgcgcgagaccgacgggcgctgcatttattgcggcaagagcatcgatatttcgaacgcacacgacgatcacatcttccctcgtaaagcgggcggattgaacattttcgcgaacctcgtggcctgctgtgcggtgtgcaacgaaaacaagaagggccgcacgcctctggagtcgggcatttcaccaaagccagagattattgcatttatgaagaacgacctgaagaagaaaatcttggaagatgctcgcaacattaacaccgtcgacttcaacaagtatatgagccacgcttcgattgggtggcgttacatgcgcgatcgccttcgcgaatcggcaggtaacaagaaactgccgatcgaacgccaaagtggtatttatacggcctactttcgtcgctggtggggtttcaagaaagagcgcggtaatactttgcaccacgctctggacgcggtgattttggcctcgcgtaagggctactcagacgacggcttagtagacatgactttaaaacccaagtacaataagggcggcgaattcgatccggagaagcacttaccggagcctatcgagttcaagatggacaaggggtcacgcggtagcgccctgcacgaccgtaatccgttgagttacaagaagggtatcatcactcgtcgcttcatggtcactgaaatcgaatgtggcaaggaagatgacgtgatctctgaaacctaccgcgagaagttgaaggaagcgttcaagcgcttcgacaccaagaagggcaagtgcctgaccgataaagaagccaaagaggcggggttctgtatcaagaagaacgagctggtgatgtcgctgaagtgttcaatcaaggggactggcccgggccaaatgattcgcattaacaacaacgtgttcaaaaccaacgtacacaacgtaggagttgacgtctacctggacgagaagggcaagaagaaggcgtacgaacgcaagaacccacgcttatcgaagcattttattgagccgccgccacaaccgaacggccgcgtctctttcacactgaagcgtcgcgacatggtgactgtagagggagaggatgccatttaccgcattaagaagttgggtacttccccgaccatcgaggcggtggtggggagcgacggtaagacgcgcacagtatcggcaacgaaattgaccaaggccaatagcgccgagctcgaggggtctggtggttctaccaatctttcagatattattgaaaaagagacaggaaagcagttggtcattcaagagagtatcctgatgttaccggaggaagttgaggaggtaatcggaaataaacccgagagcgacattttagtccacactgcttatgacgagagtacggatgagaatgtgatgctgcttacgtcagatgcgcccgagtataagccgtgggccctggtcattcaggacagtaacggcgaaaacaagatcaaaatgctttctggtggttctcccaagaagaagaggaaagtctaagatccggctgctaacaaagcccgaaaggaagctgagttggctgctgccaccgctgagcaataactagcataaccccttggggcctctaaacgggtcttgaggggttttttgctgaaaggaggaactatatccggattggcgaatgggacgcgccctgtagcggcgcattaagcgcggcgggtgtggtggttacgcgcagcgtgaccgctacacttgccagcgccctagcgcccgctcctttcgctttcttcccttcctttctcgccacgttcgccggctttccccgtcaagctctaaatcgggggctccctttagggttccgatttagtgctttacggcacctcgaccccaaaaaacttgattagggtgatggttcacgtagtgggccatcgccctgatagacggtttttcgccctttgacgttggagtccacgttctttaatagtggactcttgttccaaactggaacaacactcaaccctatctcggtctattcttttgatttataagggattttgccgatttcggcctattggttaaaaaatgagctgatttaacaaaaatttaacgcgaattttaacaaaatattaacgcttacaatttaggtggcacttttcggggaaatgtgcgcggaacccctatttgtttatttttctaaatacattcaaatatgtatccgctcatgagacaataaccctgataaatgcttcaataatattgaaaaaggaagagtatgagtattcaacatttccgtgtcgcccttattcccttttttgcggcattttgccttcctgtttttgctcacccagaaacgctggtgaaagtaaaagatgctgaagatcagttgggtgcacgagtgggttacatcgaactggatctcaacagcggtaagatccttgagagttttcgccccgaagaacgttttccaatgatgagcacttttaaagttctgctatgtggcgcggtattatcccgtattgacgccgggcaagagcaactcggtcgccgcatacactattctcagaatgacttggttgagtactcaccagtcacagaaaagcatcttacggatggcatgacagtaagagaattatgcagtgctgccataaccatgagtgataacactgcggccaacttacttctgacaacgatcggaggaccgaaggagctaaccgcttttttgcacaacatgggggatcatgtaactcgccttgatcgttgggaaccggagctgaatgaagccataccaaacgacgagcgtgacaccacgatgcctgcagcaatggcaacaacgttgcgcaaactattaactggcgaactacttactctagcttcccggcaacaattaatagactggatggaggcggataaagttgcaggaccacttctgcgctcggcccttccggctggctggtttattgctgataaatctggagccggtgagcgtgggtctcgcggtatcattgcagcactggggccagatggtaagccctcccgtatcgtagttatctacacgacggggagtcaggcaactatggatgaacgaaatagacagatcgctgagataggtgcctcactgattaagcattggtaactgtcagaccaagtttactcatatatactttagattgatttaaaacttcatttttaatttaaaaggatctaggtgaagatcctttttgataatctcatgaccaaaatcccttaacgtgagttttcgttccactgagcgtcagaccccgtagaaaagatcaaaggatcttcttgagatcctttttttctgcgcgtaatctgctgcttgcaaacaaaaaaaccaccgctaccagcggtggtttgtttgccggatcaagagctaccaactctttttccgaaggtaactggcttcagcagagcgcagataccaaatactgtccttctagtgtagccgtagttaggccaccacttcaagaactctgtagcaccgcctacatacctcgctctgctaatcctgttaccagtggctgctgccagtggcgataagtcgtgtcttaccgggttggactcaagacgatagttaccggataaggcgcagcggtcgggctgaacggggggttcgtgcacacagcccagcttggagcgaacgacctacaccgaactgagatacctacagcgtgagctatgagaaagcgccacgcttcccgaagggagaaaggcggacaggtatccggtaagcggcagggtcggaacaggagagcgcacgagggagcttccagggggaaacgcctggtatctttatagtcctgtcgggtttcgccacctctgacttgagcgtcgatttttgtgatgctcgtcaggggggcggagcctatggaaaaacgccagcaacgcggcctttttacggttcctggccttttgctggccttttgctcacatgttctttcctgcgttatcccctgattctgtggataaccgtattaccgcctttgagtgagctgataccgctcgccgcagccgaacgaccgagcgcagcgagtcagtgagcgaggaagcggaagagcgcctgatgcggtattttctccttacgcatctgtgcggtatttcacaccgcaatggtgcactctcagtacaatctgctctgatgccgcatagttaagccagtatacactccgctatcgctacgtgactgggtcatggctgcgccccgacacccgccaacacccgctgacgcgccctgacgggcttgtctgctcccggcatccgcttacagacaagctgtgaccgtctccgggagctgcatgtgtcagaggttttcaccgtcatcaccgaaacgcgcgaggcagctgcggtaaagctcatcagcgtggtcgtgaagcgattcacagatgtctgcctgttcatccgcgtccagctcgttgagtttctccagaagcgttaatgtctggcttctgataaagcgggccatgttaagggcggttttttcctgtttggtcactgatgcctccgtgtaagggggatttctgttcatgggggtaatgataccgatgaaacgagagaggatgctcacgatacgggttactgatgatgaacatgcccggttactggaacgttgtgagggtaaacaactggcggtatggatgcggcgggaccagagaaaaatcactcagggtcaatgccagcgcttcgttaatacagatgtaggtgttccacagggtagccagcagcatcctgcgatgcagatccggaacataatggtgcagggcgctgacttccgcgtttccagactttacgaaacacggaaaccgaagaccattcatgttgttgctcaggtcgcagacgttttgcagcagcagtcgcttcacgttcgctcgcgtatcggtgattcattctgctaaccagtaaggcaaccccgccagcctagccgggtcctcaacgacaggagcacgatcatgcgcacccgtggggccgccatgccggcgataatggcctgcttctcgccgaaacgtttggtggcgggaccagtgacgaaggcttgagcgagggcgtgcaagattccgaataccgcaagcgacaggccgatcatcgtcgcgctccagcgaaagcggtcctcgccgaaaatgacccagagcgctgccggcacctgtcctacgagttgcatgataaagaagacagtcataagtgcggcgacgatagtcatgccccgcgcccaccggaaggagctgactgggttgaaggctctcaagggcatcggtcgagatcccggtgcctaatgagtgagctaacttacattaattgcgttgcgctcactgcccgctttccagtcgggaaacctgtcgtgccagctgcattaatgaatcggccaacgcgcggggagaggcggtttgcgtattgggcgccagggtggtttttcttttcaccagtgagacgggcaacagctgattgcccttcaccgcctggccctgagagagttgcagcaagcggtccacgctggtttgccccagcaggcgaaaatcctgtttgatggtggttaacggcgggatataacatgagctgtcttcggtatcgtcgtatcccactaccgagatatccgcaccaacgcgcagcccggactcggtaatggcgcgcattgcgcccagcgccatctgatcgttggcaaccagcatcgcagtgggaacgatgccctcattcagcatttgcatggtttgttgaaaaccggacatggcactccagtcgccttcccgttccgctatcggctgaatttgattgcgagtgagatatttatgccagccagccagacgcagacgcgccgagacagaacttaatgggcccgctaacagcgcgatttgctggtgacccaatgcgaccagatgctccacgcccagtcgcgtaccgtcttcatgggagaaaataatactgttgatgggtgtctggtcagagacatcaagaaataacgccggaacattagtgcaggcagcttccacagcaatggcatcctggtcatccagcggatagttaatgatcagcccactgacgcgttgcgcgagaagattgtgcaccgccgctttacaggcttcgacgccgcttcgttctaccatcgacaccaccacgctggcacccagttgatcggcgcgagatttaatcgccgcgacaatttgcgacggcgcgtgcagggccagactggaggtggcaacgccaatcagcaacgactgtttgcccgccagttgttgtgccacgcggttgggaatgtaattcagctccgccatcgccgcttccactttttcccgcgttttcgcagaaacgtggctggcctggttcaccacgcgggaaacggtctgataagagacaccggcatactctgcgacatcgtataacgttactggtttcacattcaccaccctgaattgactctcttccgggcgctatcatgccataccgcgaaaggttttgcgccattcgatggtgtccgggatctcgacgctctcccttatgcgactcctgcattaggaagcagcccagtagtaggttgaggccgttgagcaccgccgccgcaaggaatggtttaattaattacggccagtcatgcataatccgcacgcatctggaataaggaagtgccattccgcctgaccttaatacgactcactatagcgcgccggagaaaaccgcctcggttacagttaagaaattaattgtaaaacgcctatacagtgaagggatatacgcttgggtttgtccagcctgagcctctatgccagaaatggcgccttcatcgtgggttaggacatttaattttaaaaaaaaaccccgcttcggcggggtttttttttagcatgcaaggagatggcgcccaacagtcccccggccacggggcctgccaccatacccacgccgaaacaagcgctcatgagcccgaagtggcgagcccgatcttccccatcggtgatgtcggcgatataggcgccagcaaccgcacctgtggcgccggtgatgccggccacgatgcgtccggcgtagaggatcgagatctcgatcccgcgaaattaatacgactcactataggggaattgtgagcggataacaattcccctctaggatccgaaataattttgtttaactttaagaaggagatatacc

SEQ ID NO: 486 - DNA, 9519 bp, synthetic construct
  source 1..9519: mol_type = other DNA
ttaattaatttgatcggcacgtaagaggttccaactttcaccataatgaaataagatcactaccgggcgtattttttgagttatcgagattttcaggagctaaggaagctaaaatggagaaaaaaatcactggatataccaccgttgatatatcccaatggcatcgtaaagaacattttgaggcatttcagtcagttgctcaatgtacctataaccagaccgttcagctggatattacggcctttttaaagaccgtaaagaaaaataagcacaagttttatccggcctttattcacattcttgcccgcctgatgaatgctcatccggaattccgtatggcaatgaaagacggtgagctggtgatatgggatagtgttcacccttgttacaccgttttccatgagcaaactgaaacgttttcatcgctctggagtgaataccacgacgatttccggcagtttctacacatatattcgcaagatgtggcgtgttacggtgaaaacctggcctatttccctaaagggtttattgagaatatgttttttgtctcagccaatccctgggtgagtttcaccagttttgatttaaacgtggccaatatggacaacttcttcgcccccgttttcaccatgggcaaatattatacgcaaggcgacaaggtgctgatgccgctggcgattcaggttcattatgccgtctgtgatggcttccatgtcggcagaatgcttaatgaattacaacagtactgcgatgagtggcagggcggggcgtaatttttttaaggcagttattggtgcccttaaacgcctggtgctacgcctgaataagtgaagcatgcaaggagatggcgcccaacagtcccccggccacggggcctgccaccatacccacgccgaaacaagcgctcatgagcccgaagtggcgagcccgatcttccccatcggtgatgtcggcgatataggcgccagcaaccgcacctgtggcgccggtgatgccggccacgatgcgtccggcgtagaggatcgactcgagtgcggccgcaagcttgtcgacggagctcgaattcggatcctaatacgactcactatagtaatgaacctgaatcgccaggttacagttaagaaattaattgtaaaacgcctatacagtgaagggatatacgcttgggtttgtccagcctgagcctctatgccagaaatggcgccttcatcgtgggttaggacatttaattttaaaaaaaaaccccgcttcggcggggtttttttttagcatgcaaggagatggcgcccaacagtcccccggccacggggcctgccaccatacccacgccgaaacaagcgctcatgagcccgaagtggcgagcccgatcttccccatcggtgatgtcggcgatataggcgccagcaaccgcacctgtggcgccggtgatgccggccacgatgcgtccggcgtagaggatcgagatctcgatcccgcgaaattaatacgactcactataggggaattgtgagcggataacaattcccctctaggatccgaaataattttgtttaactttaagaaggagatataccccgcggatgactgattctcaaaatgatacagatgaatactggatgggagaggccctgaagttggcacaaaaggcatgggacgaaggagaggtgcccgtaggagccatcttggttcgtaagggcgaagttatcggtcatggctggaaccgtagcatcgggtcccatgacccctcggcgcatgctgaaattatggctattcgtgaagccggggtgcgtatcggtaattatcgcatgttggataccgtattatacgttacgctggagccgtgtgcaatgtgcgcaggggcacttgttcacgggcgtatttcacgcttggtctttggtgccgaaaaccccaagacaggggcgtgcgggtcagtcatggacattgctcgccaccctgctttgaaccaccaattacaagttgatggtggggtaatggcggctccttgtgcgcgtcttttatctgacttctttcgctggcgtcgcgctcagaaaaaggcggcccgtgataatagttcggggaacggtacctcaggcgggtcgtcgggaggaagcagtggcagcgagactcccggaacttcggagagcgctacaccagaaagtagtggaggcagctctggtgggtccatggagcgcgagctggtgctggggatcgcgtatggtggtaagtacacgggcttggcggtggtggatcgccgccacaaccaagtgctgtacgcgaatcgtcttaaaatgcgtgatgacgtggcaggcatcttgaaggaccgtcgcaaacagcgcgggattcgtcgcacggcccagacgaagaagaaacgccttcgcgagctgaagaattacctgaagagcatcgggtacaatgagtcgacggccaccttcgagaccgtgtattcactggcgcacaagcgtggttacgactacgcagacatgccagaggagaaaaccagtgaggagattgaagcgatggacgttgaggaacgtaagcaatgggagaaggaaaagcaagagtgggaagaaactaagcgcaactctcgccatcgcaaagaggtagttaaggacgtacacaaggcgatgatcgagggccgtgccacggaagaacaaattaagcgtgtggagcgcatcttcaacaagcaatatcgcccgaagcgttttaacaaccgcatcttgaccaagtgcaaagtggaagactgtggtgtgaacactcctttgcgtaagaacgtacgcgacctgctgattgagaacattgttcgtttctttccgattgagcagagcgagaaagacaacctgaaggacgccgtattagacaagaatcgtcgcgaagaggtgaagtccttctttcgcaagcacaaaaccgacgagcacatccgtaaacaagtgtacgacattgccgacaataaactgagcgggcgtactgtattctgcaaggagcacattctggagcacacggaacactccaaggaagagcgtaaagtctttcgcctggcaccgagtctgaagacgaagattgaaaacgtgctggcagtaatcaaggatgaaattctccctaagttcacggtgaacaaagtagtgatggaatcaaataacttcgacatcgccgcgaagacccaaggtaagaagcgtctcgccaaggaagagtacggcaagggcccgcgtgagggtaaggaaacgcgcaaagaggcgctgctgcgcgagaccgacgggcgctgcatttattgcggcaagagcatcgatatttcgaacgcacacgacgatcacatcttccctcgtaaagcgggcggattgaacattttcgcgaacctcgtggcctgctgtgcggtgtgcaacgaaaacaagaagggccgcacgcctctggagtcgggcatttcaccaaagccagagattattgcatttatgaagaacgacctgaagaagaaaatcttggaagatgctcgcaacattaacaccgtcgacttcaacaagtatatgagccacgcttcgattgggtggcgttacatgcgcgatcgccttcgcgaatcggcaggtaacaagaaactgccgatcgaacgccaaagtggtatttatacggcctactttcgtcgctggtggggtttcaagaaagagcgcggtaatactttgcaccacgctctggacgcggtgattttggcctcgcgtaagggctactcagacgacggcttagtagacatgactttaaaacccaagtacaataagggcggcgaattcgatccggagaagcacttaccggagcctatcgagttcaagatggacaaggggtcacgcggtagcgccctgcacgaccgtaatccgttgagttacaagaagggtatcatcactcgtcgcttcatggtcactgaaatcgaatgtggcaaggaagatgacgtgatctctgaaacctaccgcgagaagttgaaggaagcgttcaagcgcttcgacaccaagaagggcaagtgcctgaccgataaagaagccaaagaggcggggttctgtatcaagaagaacgagctggtgatgtcgctgaagtgttcaatcaaggggactggcccgggccaaatgattcgcattaacaacaacgtgttcaaaaccaacgtacacaacgtaggagttgacgtctacctggacgagaagggcaagaagaaggcgtacgaacgcaagaacccacgcttatcgaagcattttattgagccgccgccacaaccgaacggccgcgtctctttcacactgaagcgtcgcgacatggtgactgtagagggagaggatgccatttaccgcattaagaagttgggtacttccccgaccatcgaggcggtggtggggagcgacggtaagacgcgcacagtatcggcaacgaaattgaccaaggccaatagcgccgagctcgagggctctggcgggtctcccaagaagaagaggaaagtctaagatccggctgctaacaaagcccgaaaggaagctgagttggctgctgccaccgctgagcaataactagcataaccccttggggcctctaaacgggtcttgaggggttttttgctgaaaggaggaactatatccggattggcgaatgggacgcgccctgtagcggcgcattaagcgcggcgggtgtggtggttacgcgcagcgtgaccgctacacttgccagcgccctagcgcccgctcctttcgctttcttcccttcctttctcgccacgttcgccggctttccccgtcaagctctaaatcgggggctccctttagggttccgatttagtgctttacggcacctcgaccccaaaaaacttgattagggtgatggttcacgtagtgggccatcgccctgatagacggtttttcgccctttgacgttggagtccacgttctttaatagtggactcttgttccaaactggaacaacactcaaccctatctcggtctattcttttgatttataagggattttgccgatttcggcctattggttaaaaaatgagctgatttaacaaaaatttaacgcgaattttaacaaaatattaacgcttacaatttaggtggcacttttcggggaaatgtgcgcggaacccctatttgtttatttttctaaatacattcaaatatgtatccgctcatgagacaataaccctgataaatgcttcaataatattgaaaaaggaagagtatgagtattcaacatttccgtgtcgcccttattcccttttttgcggcattttgccttcctgtttttgctcacccagaaacgctggtgaaagtaaaagatgctgaagatcagttgggtgcacgagtgggttacatcgaactggatctcaacagcggtaagatccttgagagttttcgccccgaagaacgttttccaatgatgagcacttttaaagttctgctatgtggcgcggtattatcccgtattgacgccgggcaagagcaactcggtcgccgcatacactattctcagaatgacttggttgagtactcaccagtcacagaaaagcatcttacggatggcatgacagtaagagaattatgcagtgctgccataaccatgagtgataacactgcggccaacttacttctgacaacgatcggaggaccgaaggagctaaccgcttttttgcacaacatgggggatcatgtaactcgccttgatcgttgggaaccggagctgaatgaagccataccaaacgacgagcgtgacaccacgatgcctgcagcaatggcaacaacgttgcgcaaactattaactggcgaactacttactctagcttcccggcaacaattaatagactggatggaggcggataaagttgcaggaccacttctgcgctcggcccttccggctggctggtttattgctgataaatctggagccggtgagcgtgggtctcgcggtatcattgcagcactggggccagatggtaagccctcccgtatcgtagttatctacacgacggggagtcaggcaactatggatgaacgaaatagacagatcgctgagataggtgcctcactgattaagcattggtaactgtcagaccaagtttactcatatatactttagattgatttaaaacttcatttttaatttaaaaggatctaggtgaagatcctttttgataatctcatgaccaaaatcccttaacgtgagttttcgttccactgagcgtcagaccccgtagaaaagatcaaaggatcttcttgagatcctttttttctgcgcgtaatctgctgcttgcaaacaaaaaaaccaccgctaccagcggtggtttgtttgccggatcaagagctaccaactctttttccgaaggtaactggcttcagcagagcgcagataccaaatactgtccttctagtgtagccgtagttaggccaccacttcaagaactctgtagcaccgcctacatacctcgctctgctaatcctgttaccagtggctgctgccagtggcgataagtcgtgtcttaccgggttggactcaagacgatagttaccggataaggcgcagcggtcgggctgaacggggggttcgtgcacacagcccagcttggagcgaacgacctacaccgaactgagatacctacagcgtgagctatgagaaagcgccacgcttcccgaagggagaaaggcggacaggtatccggtaagcggcagggtcggaacaggagagcgcacgagggagcttccagggggaaacgcctggtatctttatagtcctgtcgggtttcgccacctctgacttgagcgtcgatttttgtgatgctcgtcaggggggcggagcctatggaaaaacgccagcaacgcggcctttttacggttcctggccttttgctggccttttgctcacatgttctttcctgcgttatcccctgattctgtggataaccgtattaccgcctttgagtgagctgataccgctcgccgcagccgaacgaccgagcgcagcgagtcagtgagcgaggaagcggaagagcgcctgatgcggtattttctccttacgcatctgtgcggtatttcacaccgcaatggtgcactctcagtacaatctgctctgatgccgcatagttaagccagtatacactccgctatcgctacgtgactgggtcatggctgcgccccgacacccgccaacacccgctgacgcgccctgacgggcttgtctgctcccggcatccgcttacagacaagctgtgaccgtctccgggagctgcatgtgtcagaggttttcaccgtcatcaccgaaacgcgcgaggcagctgcggtaaagctcatcagcgtggtcgtgaagcgattcacagatgtctgcctgttcatccgcgtccagctcgttgagtttctccagaagcgttaatgtctggcttctgataaagcgggccatgttaagggcggttttttcctgtttggtcactgatgcctccgtgtaagggggatttctgttcatgggggtaatgataccgatgaaacgagagaggatgctcacgatacgggttactgatgatgaacatgcccggttactggaacgttgtgagggtaaacaactggcggtatggatgcggcgggaccagagaaaaatcactcagggtcaatgccagcgcttcgttaatacagatgtaggtgttccacagggtagccagcagcatcctgcgatgcagatccggaacataatggtgcagggcgctgacttccgcgtttccagactttacgaaacacggaaaccgaagaccattcatgttgttgctcaggtcgcagacgttttgcagcagcagtcgcttcacgttcgctcgcgtatcggtgattcattctgctaaccagtaaggcaaccccgccagcctagccgggtcctcaacgacaggagcacgatcatgcgcacccgtggggccgccatgccggcgataatggcctgcttctcgccgaaacgtttggtggcgggaccagtgacgaaggcttgagcgagggcgtgcaagattccgaataccgcaagcgacaggccgatcatcgtcgcgctccagcgaaagcggtcctcgccgaaaatgacccagagcgctgccggcacctgtcctacgagttgcatgataaagaagacagtcataagtgcggcgacgatagtcatgccccgcgcccaccggaaggagctgactgggttgaaggctctcaagggcatcggtcgagatcccggtgcctaatgagtgagctaacttacattaattgcgttgcgctcactgcccgctttccagtcgggaaacctgtcgtgccagctgcattaatgaatcggccaacgcgcggggagaggcggtttgcgtattgggcgccagggtggtttttcttttcaccagtgagacgggcaacagctgattgcccttcaccgcctggccctgagagagttgcagcaagcggtccacgctggtttgccccagcaggcgaaaatcctgtttgatggtggttaacggcgggatataacatgagctgtcttcggtatcgtcgtatcccactaccgagatatccgcaccaacgcgcagcccggactcggtaatggcgcgcattgcgcccagcgccatctgatcgttggcaaccagcatcgcagtgggaacgatgccctcattcagcatttgcatggtttgttgaaaaccggacatggcactccagtcgccttcccgttccgctatcggctgaatttgattgcgagtgagatatttatgccagccagccagacgcagacgcgccgagacagaacttaatgggcccgctaacagcgcgatttgctggtgacccaatgcgaccagatgctccacgcccagtcgcgtaccgtcttcatgggagaaaataatactgttgatgggtgtctggtcagagacatcaagaaataacgccggaacattagtgcaggcagcttccacagcaatggcatcctggtcatccagcggatagttaatgatcagcccactgacgcgttgcgcgagaagattgtgcaccgccgctttacaggcttcgacgccgcttcgttctaccatcgacaccaccacgctggcacccagttgatcggcgcgagatttaatcgccgcgacaatttgcgacggcgcgtgcagggccagactggaggtggcaacgccaatcagcaacgactgtttgcccgccagttgttgtgccacgcggttgggaatgtaattcagctccgccatcgccgcttccactttttcccgcgttttcgcagaaacgtggctggcctggttcaccacgcgggaaacggtctgataagagacaccggcatactctgcgacatcgtataacgttactggtttcacattcaccaccctgaattgactctcttccgggcgctatcatgccataccgcgaaaggttttgcgccattcgatggtgtccgggatctcgacgctctcccttatgcgactcctgcattaggaagcagcccagtagtaggttgaggccgttgagcaccgccgccgcaaggaatggtttaattaattctaga

SEQ ID NO: 487 - DNA, 11211 bp, synthetic construct
  source 1..11211: mol_type = other DNA
gaaataattttgtttaactttaagaaggagatataccatgggcagcagtcatcatcatcaccatcacatgactgattctcaaaatgatacagatgaatactggatgggagaggccctgaagttggcacaaaaggcatgggacgaaggagaggtgcccgtaggagccatcttggttcgtaagggcgaagttatcggtcatggctggaaccgtagcatcgggtcccatgacccctcggcgcatgctgaaattatggctattcgtgaagccggggtgcgtatcggtaattatcgcatgttggataccgtattatacgttacgctggagccgtgtgcaatgtgcgcaggggcacttgttcacgggcgtatttcacgcttggtctttggtgccgaaaaccccaagacaggggcgtgcgggtcagtcatggacattgctcgccaccctgctttgaaccaccaattacaagttgatggtggggtaatggcggctccttgtgcgcgtcttttatctgacttctttcgctggcgtcgcgctcagaaaaaggcggcccgtgataatagttcggggaactcaggcgggtcgtcgggaggaagcagtggcagcgagactcccggaacttcggagagcgctacaccagaaagtagtggaggcagctctggtgggtccatggataagaaatactcaataggactggcgattggcacaaatagcgtcggatgggctgtgatcactgatgaatataaggttccttctaaaaagttcaaggttctgggaaatacagaccgccacagtatcaaaaaaaatcttataggggctcttctgtttgacagtggagagacagccgaagctactagactcaaacggacagctaggagaaggtatacaagacggaagaataggatttgttatctccaggagattttttcaaatgagatggccaaagtggatgatagtttctttcatagacttgaagagtcttttttggtggaagaagacaagaagcatgaaagacatcctatttttggaaatatagtggatgaagttgcttatcacgagaaatatccaactatctatcatctgagaaaaaaattggtggattctactgataaagccgatttgcgcctgatctatttggccctggcccacatgattaagtttagaggtcattttttgattgagggcgatctgaatcctgataatagtgatgtggacaaactgtttatccagttggtgcaaacctacaatcaactgtttgaagaaaaccctattaacgcaagtggagtggatgctaaagccattctttctgcaagattgagtaaatcaagaagactggaaaatctcattgctcagctccccggtgagaagaaaaatggcctgtttgggaatctcattgctttgtcattgggtttgacccctaattttaaatcaaattttgatttggcagaagatgctaaactccagctttcaaaagatacttacgatgatgatctggataatctgttggctcaaattggagatcaatatgctgatttgtttttggcagctaagaatctgtcagatgctattctgctttcagacatcctgagagtgaatactgaaataactaaggctcccctgtcagcttcaatgattaaacgctacgatgaacatcatcaagacttgactcttctgaaagccctggttagacaacaacttccagaaaagtataaagaaatcttttttgatcaatcaaaaaacggatatgcaggttatattgatggcggcgcaagccaagaagaattttataaatttatcaaaccaattctggaaaaaatggatggtactgaggaactgttggtgaaactgaatagagaagatttgctgcgcaagcaacggacctttgacaacggctctattccccatcaaattcacttgggtgagctgcatgctattttgagaagacaagaagacttttatccatttctgaaagacaatagagagaagattgaaaaaatcttgacttttaggattccttattatgttggtccattggccagaggcaatagtaggtttgcatggatgactcggaagtctgaagaaacaattaccccatggaattttgaagaagttgtcgataaaggtgcttcagctcaatcatttattgaacgcatgacaaactttgataaaaatcttccaaatgaaaaagtgctgccaaaacatagtttgctttatgagtattttaccgtttataacgaattgacaaaggtcaaatatgttactgaaggaatgagaaaaccagcatttctttcaggtgaacagaagaaagccattgttgatctgctcttcaaaacaaataggaaagtgaccgttaagcaactgaaagaagattatttcaaaaaaatagaatgttttgatagtgttgaaatttcaggagttgaagatagatttaatgcttcactgggtacataccatgatttgctgaaaattattaaagataaagattttttggataatgaagaaaatgaagacatcctggaggatattgttctgacattgaccctgtttgaagatagggagatgattgaggaaagacttaaaacatacgctcacctctttgatgataaggtgatgaaacagcttaaaagacgcagatatactggttggggaaggttgtccagaaaattgattaatggtattagggataagcaatctggcaaaacaatactggattttttgaaatcagatggttttgccaatcgcaattttatgcagctcatccatgatgatagtttgacatttaaagaagacatccaaaaagcacaagtgtctggacaaggcgatagtctgcatgaacatattgcaaatctggctggtagccctgctattaaaaaaggtattctccagactgtgaaagttgttgatgaattggtcaaagtgatggggcggcataagccagaaaatatcgttattgaaatggcaagagaaaatcagacaactcaaaagggccagaaaaattccagagagaggatgaaaagaatcgaagaaggtatcaaagaactgggaagtcagattcttaaagagcatcctgttgaaaatactcaattgcaaaatgaaaagctctatctctattatctccaaaatggaagagatatgtatgtggaccaagaactggatattaataggctgagtgattatgatgtcgatcacattgttccacaaagtttccttaaagacgattcaatagacaataaggtcctgaccaggtctgataaaaatagaggtaaatccgataacgttccaagtgaagaagtggtcaaaaagatgaaaaactattggagacaacttctgaacgccaagctgatcactcaaaggaagtttgataatctgaccaaagctgaaagaggaggtttgagtgaacttgataaagctggttttatcaaacgccaattggttgaaactcgccaaatcactaagcatgtggcacaaattttggatagtcgcatgaatactaaatacgatgaaaatgataaacttattagagaggttaaagtgattaccctgaaatctaaactggtttctgacttcagaaaagatttccaattctataaagtgagagagattaacaattaccatcatgcccatgatgcctatctgaatgccgtcgttggaactgctttgattaagaaatatccaaaacttgaaagcgagtttgtctatggtgattataaagtttatgatgttaggaaaatgattgctaagtctgagcaagaaataggcaaagcaaccgcaaagtatttcttttactctaatatcatgaacttcttcaaaacagaaattacacttgcaaatggagagattcgcaaacgccctctgatcgaaactaatggggaaactggagaaattgtctgggataaagggagagattttgccacagtgcgcaaagtgttgtccatgccccaagtcaatatcgtcaagaaaacagaagtgcagacaggcggattctctaaggagtcaattctgccaaaaagaaattccgacaagctgattgctaggaaaaaagactgggacccaaaaaaatatggtggttttgatagtccaaccgtggcttattcagtcctggtggttgctaaggtggaaaaagggaaatccaagaagctgaaatccgttaaagagctgctggggatcacaattatggaaagaagttcctttgaaaaaaatcccattgactttctggaagctaaaggatataaggaagttaaaaaagacctgatcattaaactgcctaaatatagtctttttgagctggaaaacggtaggaaacggatgctggctagtgccggagaactgcaaaaaggaaatgagctggctctgccaagcaaatatgtgaattttctgtatctggctagtcattatgaaaagttgaagggtagtccagaagataacgaacaaaaacaattgtttgtggagcagcataagcattatctggatgagattattgagcaaatcagtgaattttctaagagagttattctggcagatgccaatctggataaagttcttagtgcatataacaaacatagagacaaaccaataagagaacaagcagaaaatatcattcatctgtttaccttgaccaatcttggagcacccgctgcttttaaatactttgatacaacaattgataggaaaagatatacctctacaaaagaagttctggatgccactcttatccatcaatccatcactggtctttatgaaacacgcattgatttgagtcagctgggaggtgacggctctggcgggtctcccaagaagaagaggaaagtctaagatccggctgctaacaaagcccgaaaggaagctgagttggctgctgccaccgctgagcaataactagcataaccccttggggcctctaaacgggtcttgaggggttttttgctgaaaggaggaactatatccggattggcgaatgggacgcgccctgtagcggcgcattaagcgcggcgggtgtggtggttacgcgcagcgtgaccgctacacttgccagcgccctagcgcccgctcctttcgctttcttcccttcctttctcgccacgttcgccggctttccccgtcaagctctaaatcgggggctccctttagggttccgatttagtgctttacggcacctcgaccccaaaaaacttgattagggtgatggttcacgtagtgggccatcgccctgatagacggtttttcgccctttgacgttggagtccacgttctttaatagtggactcttgttccaaactggaacaacactcaaccctatctcggtctattcttttgatttataagggattttgccgatttcggcctattggttaaaaaatgagctgatttaacaaaaatttaacgcgaattttaacaaaatattaacgcttacaatttaggtggcacttttcggggaaatgtgcgcggaacccctatttgtttatttttctaaatacattcaaatatgtatccgctcatgagacaataaccctgataaatgcttcaataatattgaaaaaggaagagtatgagtattcaacatttccgtgtcgcccttattcccttttttgcggcattttgccttcctgtttttgctcacccagaaacgctggtgaaagtaaaagatgctgaagatcagttgggtgcacgagtgggttacatcgaactggatctcaacagcggtaagatccttgagagttttcgccccgaagaacgttttccaatgatgagcacttttaaagttctgctatgtggcgcggtattatcccgtattgacgccgggcaagagcaactcggtcgccgcatacactattctcagaatgacttggttgagtactcaccagtcacagaaaagcatcttacggatggcatgacagtaagagaattatgcagtgctgccataaccatgagtgataacactgcggccaacttacttctgacaacgatcggaggaccgaaggagctaaccgcttttttgcacaacatgggggatcatgtaactcgccttgatcgttgggaaccggagctgaatgaagccataccaaacgacgagcgtgacaccacgatgcctgcagcaatggcaacaacgttgcgcaaactattaactggcgaactacttactctagcttcccggcaacaattaatagactggatggaggcggataaagttgcaggaccacttctgcgctcggcccttccggctggctggtttattgctgataaatctggagccggtgagcgtgggtctcgcggtatcattgcagcactggggccagatggtaagccctcccgtatcgtagttatctacacgacggggagtcaggcaactatggatgaacgaaatagacagatcgctgagataggtgcctcactgattaagcattggtaactgtcagaccaagtttactcatatatactttagattgatttaaaacttcatttttaatttaaaaggatctaggtgaagatcctttttgataatctcatgaccaaaatcccttaacgtgagttttcgttccactgagcgtcagaccccgtagaaaagatcaaaggatcttcttgagatcctttttttctgcgcgtaatctgctgcttgcaaacaaaaaaaccaccgctaccagcggtggtttgtttgccggatcaagagctaccaactctttttccgaaggtaactggcttcagcagagcgcagataccaaatactgtccttctagtgtagccgtagttaggccaccacttcaagaactctgtagcaccgcctacatacctcgctctgctaatcctgttaccagtggctgctgccagtggcgataagtcgtgtcttaccgggttggactcaagacgatagttaccggataaggcgcagcggtcgggctgaacggggggttcgtgcacacagcccagcttggagcgaacgacctacaccgaactgagatacctacagcgtgagctatgagaaagcgccacgcttcccgaagggagaaaggcggacaggtatccggtaagcggcagggtcggaacaggagagcgcacgagggagcttccagggggaaacgcctggtatctttatagtcctgtcgggtttcgccacctctgacttgagcgtcgatttttgtgatgctcgtcaggggggcggagcctatggaaaaacgccagcaacgcggcctttttacggttcctggccttttgctggccttttgctcacatgttctttcctgcgttatcccctgattctgtggataaccgtattaccgcctttgagtgagctgataccgctcgccgcagccgaacgaccgagcgcagcgagtcagtgagcgaggaagcggaagagcgcctgatgcggtattttctccttacgcatctgtgcggtatttcacaccgcaatggtgcactctcagtacaatctgctctgatgccgcatagttaagccagtatacactccgctatcgctacgtgactgggtcatggctgcgccccgacacccgccaacacccgctgacgcgccctgacgggcttgtctgctcccggcatccgcttacagacaagctgtgaccgtctccgggagctgcatgtgtcagaggttttcaccgtcatcaccgaaacgcgcgaggcagctgcggtaaagctcatcagcgtggtcgtgaagcgattcacagatgtctgcctgttcatccgcgtccagctcgttgagtttctccagaagcgttaatgtctggcttctgataaagcgggccatgttaagggcggttttttcctgtttggtcactgatgcctccgtgtaagggggatttctgttcatgggggtaatgataccgatgaaacgagagaggatgctcacgatacgggttactgatgatgaacatgcccggttactggaacgttgtgagggtaaacaactggcggtatggatgcggcgggaccagagaaaaatcactcagggtcaatgccagcgcttcgttaatacagatgtaggtgttccacagggtagccagcagcatcctgcgatgcagatccggaacataatggtgcagggcgctgacttccgcgtttccagactttacgaaacacggaaaccgaagaccattcatgttgttgctcaggtcgcagacgttttgcagcagcagtcgcttcacgttcgctcgcgtatcggtgattcattctgctaaccagtaaggcaaccccgccagcctagccgggtcctcaacgacaggagcacgatcatgcgcacccgtggggccgccatgccggcgataatggcctgcttctcgccgaaacgtttggtggcgggaccagtgacgaaggcttgagcgagggcgtgcaagattccgaataccgcaagcgacaggccgatcatcgtcgcgctccagcgaaagcggtcctcgccgaaaatgacccagagcgctgccggcacctgtcctacgagttgcatgataaagaagacagtcataagtgcggcgacgatagtcatgccccgcgcccaccggaaggagctgactgggttgaaggctctcaagggcatcggtcgagatcccggtgcctaatgagtgagctaacttacattaattgcgttgcgctcactgcccgctttccagtcgggaaacctgtcgtgccagctgcattaatgaatcggccaacgcgcggggagaggcggtttgcgtattgggcgccagggtggtttttcttttcaccagtgagacgggcaacagctgattgcccttcaccgcctggccctgagagagttgcagcaagcggtccacgctggtttgccccagcaggcgaaaatcctgtttgatggtggttaacggcgggatataacatgagctgtcttcggtatcgtcgtatcccactaccgagatatccgcaccaacgcgcagcccggactcggtaatggcgcgcattgcgcccagcgccatctgatcgttggcaaccagcatcgcagtgggaacgatgccctcattcagcatttgcatggtttgttgaaaaccggacatggcactccagtcgccttcccgttccgctatcggctgaatttgattgcgagtgagatatttatgccagccagccagacgcagacgcgccgagacagaacttaatgggcccgctaacagcgcgatttgctggtgacccaatgcgaccagatgctccacgcccagtcgcgtaccgtcttcatgggagaaaataatactgttgatgggtgtctggtcagagacatcaagaaataacgccggaacattagtgcaggcagcttccacagcaatggcatcctggtcatccagcggatagttaatgatcagcccactgacgcgttgcgcgagaagattgtgcaccgccgctttacaggcttcgacgccgcttcgttctaccatcgacaccaccacgctggcacccagttgatcggcgcgagatttaatcgccgcgacaatttgcgacggcgcgtgcagggccagactggaggtggcaacgccaatcagcaacgactgtttgcccgccagttgttgtgccacgcggttgggaatgtaattcagctccgccatcgccgcttccactttttcccgcgttttcgcagaaacgtggctggcctggttcaccacgcgggaaacggtctgataagagacaccggcatactctgcgacatcgtataacgttactggtttcacattcaccaccctgaattgactctcttccgggcgctatcatgccataccgcgaaaggttttgcgccattcgatggtgtccgggatctcgacgctctcccttatgcgactcctgcattaggaagcagcccagtagtaggttgaggccgttgagcaccgccgccgcaaggaatggtttaattaatttgatcggcacgtaagaggttccaactttcaccataatgaaataagatcactaccgggcgtattttttgagttatcgagattttcaggagctaaggaagctaaaatggagaaaaaaatcactggatataccaccgttgatatatcccaatggcatcgtaaagaacattttgaggcatttcagtcagttgctcaatgtacctataaccagaccgttcagctggatattacggcctttttaaagaccgtaaagaaaaataagcacaagttttatccggcctttattcacattcttgcccgcctgatgaatgctcatccggaattccgtatggcaatgaaagacggtgagctggtgatatgggatagtgttcacccttgttacaccgttttccatgagcaaactgaaacgttttcatcgctctggagtgaataccacgacgatttccggcagtttctacacatatattcgcaagatgtggcgtgttacggtgaaaacctggcctatttccctaaagggtttattgagaatatgttttttgtctcagccaatccctgggtgagtttcaccagttttgatttaaacgtggccaatatggacaacttcttcgcccccgttttcaccatgggcaaatattatacgcaaggcgacaaggtgctgatgccgctggcgattcaggttcattatgccgtctgtgatggcttccatgtcggcagaatgcttaatgaattacaacagtactgcgatgagtggcagggcggggcgtaatttttttaaggcagttattggtgcccttaaacgcctggtgctacgcctgaataagtgaagcatgcaaggagatggcgcccaacagtcccccggccacggggcctgccaccatacccacgccgaaacaagcgctcatgagcccgaagtggcgagcccgatcttccccatcggtgatgtcggcgatataggcgccagcaaccgcacctgtggcgccggtgatgccggccacgatgcgtccggcgtagaggatcgactcgagtgcggccgcaagcttgtcgacggagctcgaattcggatcctaatacgactcactatagtaatgaacctgaatcgccaggttttagagctagaaatagcaagttaaaataaggctagtccgttatcaacttgaaaaagtggcaccgagtcggtgcttttttgtgaacctgcaggaggcatcaaataaaacgaaaggctcagtcgaaagactgggcctttcgttttatctgttgtttgtcggtgaacgctctcctgagtaggacaaattcgatcccgcgaaattaatacgactcactataggggaattgtgagcggataacaattcccctctaggatcc

SEQ ID NO: 488 - DNA, 96 bp, synthetic construct
  source 1..96: mol_type = other DNA
gttgtaattccctagaaataggttattacaataaggtccaacaggagtgttggtaccgtaaagctctaacggcacccacgggtgccgttatctttt

SEQ ID NO: 489 - DNA, 123 bp, synthetic construct
  source 1..123: mol_type = other DNA
gttacagttaagaaattaattgtaaaacgcctatacagtgaagggatatacgcttgggtttgtccagcctgagcctctatgccagaaatggcgccttcatcgtgggttaggacatttaatttt

SEQ ID NO: 490 - DNA, 22 bp, synthetic construct
  source 1..22: mol_type = other DNA
gatccgcgctggctaccggcga

SEQ ID NO: 491 - DNA, 22 bp, synthetic construct
  source 1..22: mol_type = other DNA
gatccgcgctggctaccggcga

SEQ ID NO: 492 - DNA, 22 bp, synthetic construct
  source 1..22: mol_type = other DNA
gatccgcgctggctaccggcga

SEQ ID NO: 493 - DNA, 22 bp, synthetic construct
  source 1..22: mol_type = other DNA
gatccgcgctggctaccggcga

SEQ ID NO: 494 - DNA, 22 bp, synthetic construct
  source 1..22: mol_type = other DNA
gatccgcgctggctaccggcga

SEQ ID NO: 495 - DNA, 20 bp, synthetic construct
  source 1..20: mol_type = other DNA
ggcccagactgagcacgtga

SEQ ID NO: 496 - DNA, 20 bp, synthetic construct
  source 1..20: mol_type = other DNA
ggcccagactgagcacgtga

SEQ ID NO: 497 - DNA, 20 bp, synthetic construct
  source 1..20: mol_type = other DNA
ggcccagactgagcacgtga

SEQ ID NO: 498 - DNA, 20 bp, synthetic construct
  source 1..20: mol_type = other DNA
ggcccagactgagcacgtga

SEQ ID NO: 499 - DNA, 22 bp, synthetic construct
  source 1..22: mol_type = other DNA
gattcccacctctcaatacgtt

SEQ ID NO: 500 - DNA, 22 bp, synthetic construct
  source 1..22: mol_type = other DNA
cccaggcaggcaggctctccga

SEQ ID NO: 501 - DNA, 22 bp, synthetic construct
  source 1..22: mol_type = other DNA
caccccctctccctccatcagt

SEQ ID NO: 502 - DNA, 22 bp, synthetic construct
  source 1..22: mol_type = other DNA
tgtacacagtttcccaagctac

SEQ ID NO: 503 - DNA, 22 bp, synthetic construct
  source 1..22: mol_type = other DNA
ctggactctggccactccctgg

SEQ ID NO: 504 - DNA, 22 bp, synthetic construct
  source 1..22: mol_type = other DNA
catccagctccagccccagagc

SEQ ID NO: 505 - DNA, 22 bp, synthetic construct
  source 1..22: mol_type = other DNA
gattccggctctgagggccagt

SEQ ID NO: 506 - DNA, 22 bp, synthetic construct
  source 1..22: mol_type = other DNA
gcccttctgtttgtcccacttg

SEQ ID NO: 507 - DNA, 22 bp, synthetic construct
  source 1..22: mol_type = other DNA
ttggccaagccaggcctagaat

SEQ ID NO: 508 - DNA, 22 bp, synthetic construct
  source 1..22: mol_type = other DNA
ctcagctggtacacggcagggt

SEQ ID NO: 509 - DNA, 22 bp, synthetic construct
  source 1..22: mol_type = other DNA
tcgcctatgggaactctggagg

SEQ ID NO: 510 - DNA, 22 bp, synthetic construct
  source 1..22: mol_type = other DNA
cctaacatggataagtccagat

SEQ ID NO: 511 - DNA, 22 bp, synthetic construct
  source 1..22: mol_type = other DNA
ggccctcagagccggaatctac

SEQ ID NO: 512 - DNA, 22 bp, synthetic construct
  source 1..22: mol_type = other DNA
tgtcctccctcaagatacagga

SEQ ID NO: 513 - DNA, 22 bp, synthetic construct
  source 1..22: mol_type = other DNA
tgtgttcacctgcccttctgtt

SEQ ID NO: 514 - DNA, 22 bp, synthetic construct
  source 1..22: mol_type = other DNA
cagtgtcccccttccctatggg

SEQ ID NO: 515 - DNA, 22 bp, synthetic construct
  source 1..22: mol_type = other DNA
cccccttccctatgggaataat

SEQ ID NO: 516 - DNA, 22 bp, synthetic construct
  source 1..22: mol_type = other DNA
cagctccagccccagagcctgg

SEQ ID NO: 517 - DNA, 22 bp, synthetic construct
  source 1..22: mol_type = other DNA
gtgcctctccctgcagacggta

SEQ ID NO: 518 - DNA, 20 bp, synthetic construct
  source 1..20: mol_type = other DNA
ttgccacgaagcaggccaat

SEQ ID NO: 519 - DNA, 20 bp, synthetic construct
  source 1..20: mol_type = other DNA
cccggggccgccattgacag

SEQ ID NO: 520 - DNA, 20 bp, synthetic construct
  source 1..20: mol_type = other DNA
tccggctctgagggccagtg

SEQ ID NO: 521 - DNA, 20 bp, synthetic construct
  source 1..20: mol_type = other DNA
caaccagtccccagtgactc

SEQ ID NO: 522 - DNA, 20 bp, synthetic construct
  source 1..20: mol_type = other DNA
gagtccgagcagaagaagaa

SEQ ID NO: 523 - DNA, 21 bp, synthetic construct
  source 1..21: mol_type = other DNA
ccaggctttacactttatgct

SEQ ID NO: 524 - DNA, 25 bp, synthetic construct
  source 1..25: mol_type = other DNA
cgaacatccaaaagtttgtgttttt

SEQ ID NO: 525 - DNA, 18 bp, synthetic construct
  source 1..18: mol_type = other DNA
ccgaaaggcgcggtgccg

SEQ ID NO: 526 - DNA, 19 bp, synthetic construct
  source 1..19: mol_type = other DNA
gtatgtggtggatgaagcc

SEQ ID NO: 527 - DNA, 18 bp, synthetic construct
  source 1..18: mol_type = other DNA
ttgtggagcgacatccag

SEQ ID NO: 528 - DNA, 19 bp, synthetic construct
  source 1..19: mol_type = other DNA
tgagcgcatttttacgcgc

SEQ ID NO: 529 - DNA, 18 bp, synthetic construct
  source 1..18: mol_type = other DNA
gaaaacggcaacccgtgg

SEQ ID NO: 530 - DNA, 20 bp, synthetic construct
  source 1..20: mol_type = other DNA
ggattgaaaatggtctgctg

SEQ ID NO: 531 - DNA, 18 bp, synthetic construct
  source 1..18: mol_type = other DNA
actgctgacgccgctgcg

SEQ ID NO: 532 - DNA, 48 bp, synthetic construct
  source 1..48: mol_type = other DNA
ccgccgccgcaaggaatggtttaattaatttgatcggcacgtaagagg

SEQ ID NO: 533 - DNA, 50 bp, synthetic construct
  source 1..50: mol_type = other DNA
ggactgttgggcgccatctccttgcatgcttcacttattcaggcgtagca

SEQ ID NO: 534 - DNA, 50 bp, synthetic construct
  source 1..50: mol_type = other DNA
aaggaatggtttaattaattctagattaattaatttgatcggcacgtaag

SEQ ID NO: 535 - DNA, 50 bp, synthetic construct; identical to SEQ ID NO: 533
  source 1..50: mol_type = other DNA

SEQ ID NO: 536 - DNA, 18 bp, synthetic construct
  source 1..18: mol_type = other DNA
gaggctggagaggcccgt

SEQ ID NO: 537 - DNA, 22 bp, synthetic construct
  source 1..22: mol_type = other DNA
gattttcatgcaggtgctgaaa

SEQ ID NO: 538 - DNA, 36 bp, synthetic construct
  source 1..36: mol_type = other DNA
gctcttccgatctnnnnnaggaggaagggcctgagt

SEQ ID NO: 539 - DNA, 36 bp, synthetic construct
  source 1..36: mol_type = other DNA
gctcttccgatctnnnnntctgccctcgtgggtttg

SEQ ID NO: 540 - DNA, 36 bp, synthetic construct
  source 1..36: mol_type = other DNA
gctcttccgatctnnnnnctctggccactccctggc

SEQ ID NO: 541 - DNA, 36 bp, synthetic construct
  source 1..36: mol_type = other DNA
gctcttccgatctnnnnnggcaggctctccgaggag

SEQ ID NO: 542 - DNA, 44 bp, synthetic construct
  source 1..44: mol_type = other DNA
gctcttccgatctnnnnngggaataataaaagtctctctcttaa

SEQ ID NO: 543 - DNA, 36 bp, synthetic construct
  source 1..36: mol_type = other DNA
gctcttccgatctnnnnnccccctccaccagtaccc

SEQ ID NO: 544 - DNA, 36 bp, synthetic construct
  source 1..36: mol_type = other DNA
gctcttccgatctnnnnncctgtccttggagaaccg

SEQ ID NO: 545 - DNA, 37 bp, synthetic construct
  source 1..37: mol_type = other DNA
gctcttccgatctnnnnngcaggtgaacacaagagct

SEQ ID NO: 546 - DNA, 37 bp, synthetic construct
  source 1..37: mol_type = other DNA
gctcttccgatctnnnnngaaggtgtggttccagaac

SEQ ID NO: 547 - DNA, 36 bp, synthetic construct
  source 1..36: mol_type = other DNA
gctcttccgatctnnnnntcgatgtcctccccattg

SEQ ID NO: 548 - DNA, 38 bp, synthetic construct
  source 1..38: mol_type = other DNA
gctcttccgatctnnnnnaaacaggctagacataggga

SEQ ID NO: 549 - DNA, 37 bp, synthetic construct
  source 1..37: mol_type = other DNA
gctcttccgatctnnnnngaagccaccagagtctcta

SEQ ID NO: 550 - DNA, 36 bp, synthetic construct
  source 1..36: mol_type = other DNA
gctcttccgatctnnnnngccgccattgacagaggg

SEQ ID NO: 551 - DNA, 41 bp, synthetic construct
  source 1..41: mol_type = other DNA
gctcttccgatctnnnnngcatcaaaacaaaagggagattg

SEQ ID NO: 552 - DNA, 36 bp, synthetic construct
  source 1..36: mol_type = other DNA
gctcttccgatctnnnnncctctgcccacctcactt

SEQ ID NO: 553 - DNA, 37 bp, synthetic construct
  source 1..37: mol_type = other DNA
gctcttccgatctnnnnngccatgtgggttaatctgg

SEQ ID NO: 554 - DNA, 36 bp, synthetic construct
  source 1..36: mol_type = other DNA
gctcttccgatctnnnnnccggacgcacctacccat

SEQ ID NO: 555 - DNA, 37 bp, synthetic construct
  source 1..37: mol_type = other DNA
gctcttccgatctnnnnnctagatgggaatggatggg

SEQ ID NO: 556 - DNA, 36 bp, synthetic construct
  source 1..36: mol_type = other DNA
gctcttccgatctnnnnnaaccacaaacccacgagg

SEQ ID NO: 557 - DNA, 36 bp, synthetic construct
  source 1..36: mol_type = other DNA
gctcttccgatctnnnnntcaatggcggccccgggc

SEQ ID NO: 558 - DNA, 36 bp, synthetic construct
  source 1..36: mol_type = other DNA
gctcttccgatctnnnnnagtgatccccagtgtccc

SEQ ID NO: 559 - DNA, 36 bp, synthetic construct
  source 1..36: mol_type = other DNA
gctcttccgatctnnnnngccctgaacgcgtttgct

SEQ ID NO: 560 - DNA, 42 bp, synthetic construct
  source 1..42: mol_type = other DNA
gctcttccgatctnnnnntgggaataataaaagtctctctct

SEQ ID NO: 561 - DNA, 36 bp, synthetic construct
  source 1..36: mol_type = other DNA
gctcttccgatctnnnnncccctccaccagtacccc

SEQ ID NO: 562 - DNA, 36 bp, synthetic construct
  source 1..36: mol_type = other DNA
gctcttccgatctnnnnncagggcctcctcagccca

SEQ ID NO: 563 - DNA, 38 bp, synthetic construct
  source 1..38: mol_type = other DNA
gctcttccgatctnnnnngtctggatgtcgtaagggaa

SEQ ID NO: 564 - DNA, 40 bp, synthetic construct
  source 1..40: mol_type = other DNA
gctcttccgatctnnnnnggggtgtaactcagaatgtttt

SEQ ID NO: 565 - DNA, 36 bp, synthetic construct
  source 1..36: mol_type = other DNA
gctcttccgatctnnnnngggagtgagactcagaga

SEQ ID NO: 566 - DNA, 39 bp, synthetic construct
  source 1..39: mol_type = other DNA
gctcttccgatctnnnnngcaaagagggaaatgagatca

SEQ ID NO: 567 - DNA, 41 bp, synthetic construct
  source 1..41: mol_type = other DNA
gctcttccgatctnnnnngtgacacatttgtttgagaatca

SEQ ID NO: 568 - DNA, 36 bp, synthetic construct
  source 1..36: mol_type = other DNA
gctcttccgatctnnnnnctttatccccgcacagag

SEQ ID NO: 569 - DNA, 36 bp, synthetic construct
  source 1..36: mol_type = other DNA
gctcttccgatctnnnnncttggcccatgggaaatc

SEQ ID NO: 570 - DNA, 36 bp, synthetic construct
  source 1..36: mol_type = other DNA
gctcttccgatctnnnnngtcccatcccaacacccc

SEQ ID NO: 571 - DNA, 36 bp, synthetic construct
  source 1..36: mol_type = other DNA
gctcttccgatctnnnnntgggcatgtgtgctccca

SEQ ID NO: 572 - DNA, 42 bp, synthetic construct
  source 1..42: mol_type = other DNA
gctcttccgatctnnnnnctatgggaataataaaagtctctc

SEQ ID NO: 573 - DNA, 36 bp, synthetic construct
  source 1..36: mol_type = other DNA
gctcttccgatctnnnnnctccaccagtaccccacc

SEQ ID NO: 574 - DNA, 36 bp, synthetic construct
  source 1..36: mol_type = other DNA
gctcttccgatctnnnnnggaccctggtctctacct

SEQ ID NO: 575 - DNA, 37 bp, synthetic construct
  source 1..37: mol_type = other DNA
gctcttccgatctnnnnncctctcccattgaactacc

SEQ ID NO: 576 - DNA, 36 bp, synthetic construct
  source 1..36: mol_type = other DNA
gctcttccgatctnnnnnccccagtgactcagggcc

SEQ ID NO: 577 - DNA, 40 bp, synthetic construct
  source 1..40: mol_type = other DNA
gctcttccgatctnnnnntcgtaagggaaagacttaggaa

SEQ ID NO: 578 - DNA, 42 bp, synthetic construct
  source 1..42: mol_type = other DNA
gctcttccgatctnnnnntctcccttttgttttgatgcattt

SEQ ID NO: 579 - DNA, 36 bp, synthetic construct
  source 1..36: mol_type = other DNA
gctcttccgatctnnnnnccaccccaggctctgggg

SEQ ID NO: 580 - DNA, 44 bp, synthetic construct
  source 1..44: mol_type = other DNA
gctcttccgatctnnnnnccttttgttttgatgcatttctgttt

SEQ ID NO: 581 - DNA, 36 bp, synthetic construct
  source 1..36: mol_type = other DNA
gctcttccgatctnnnnnaatctaccaccccaggct

SEQ ID NO: 582 - DNA, 36 bp, synthetic construct
  source 1..36: mol_type = other DNA
gctcttccgatctnnnnnatccccagtgtccccctt

SEQ ID NO: 583 - DNA, 36 bp, synthetic construct
  source 1..36: mol_type = other DNA
gctcttccgatctnnnnnccaggccctgaacgcgtt

SEQ ID NO: 584 - DNA, 36 bp, synthetic construct
  source 1..36: mol_type = other DNA
gctcttccgatctnnnnnaggccaggcctgcggggg

SEQ ID NO: 585 - DNA, 41 bp, synthetic construct
  source 1..41: mol_type = other DNA
gctcttccgatctnnnnnccaaaaactcccaaattagcaaa

SEQ ID NO: 586 - protein, 969 aa, synthetic construct
MGSSHHHHHHSEVEFSHEYWMRHALTLAKRARDEREVPVGAVLVLNNRVIGEGWNRAIGLHDPTAHAEIMALRQGGLVMQNYRLIDATLYSTFEPCVMCAGAMIHSRIGRVVFGVRNAKTGAAGSLMDVLHYPGMNHRVEITEGILADECAALLCYFFRMPRRVFNAQKKAQSSTDSGGSSGGSSGSETPGTSESATPESSGGSSGGSMERELVLGIAYGGKYTGLAVVDRRHNQVLYANRLKMRDDVAGILKDRRKQRGIRRTAQTKKKRLRELKNYLKSIGYNESTATFETVYSLAHKRGYDYADMPEEKTSEEIEAMDVEERKQWEKEKQEWEETKRNSRHRKEVVKDVHKAMIEGRATEEQIKRVERIFNKQYRPKRFNNRILTKCKVEDCGVNTPLRKNVRDLLIENIVRFFPIEQSEKDNLKDAVLDKNRREEVKSFFRKHKTDEHIRKQVYDIADNKLSGRTVFCKEHILEHTEHSKEERKVFRLAPSLKTKIENVLAVIKDEILPKFTVNKVVMESNNFDIAAKTQGKKRLAKEEYGKGPREGKETRKEALLRETDGRCIYCGKSIDISNAHDDHIFPRKAGGLNIFANLVACCAVCNENKKGRTPLESGISPKPEIIAFMKNDLKKKILEDARNINTVDFNKYMSHASIGWRYMRDRLRESAGNKKLPIERQSGIYTAYFRRWWGFKKERGNTLHHALDAVILASRKGYSDDGLVDMTLKPKYNKGGEFDPEKHLPEPIEFKMDKGSRGSALHDRNPLSYKKGIITRRFMVTEIECGKEDDVISETYREKLKEAFKRFDTKKGKCLTDKEAKEAGFCIKKNELVMSLKCSIKGTGPGQMIRINNNVFKTNVHNVGVDVYLDEKGKKKAYERKNPRLSKHFIEPPPQPNGRVSFTLKRRDMVTVEGEDAIYRIKKLGTSPTIEAVVGSDGKTRTVSATKLTKANSAELEGSGGSPKKKRKV

SEQ ID NO: 587 - protein, 1104 aa, synthetic construct
MGSSHHHHHHMSSETGPVAVDPTLRRRIEPHEFEVFFDPRELRKETCLLYEINWGGRHSIWRHTSQNTNKHVEVNFIEKFTTERYFCPNTRCSITWFLSWSPCGECSRAITEFLSRYPHVTLFIYIARLYHHADPRNRQGLRDLISSGVTIQIMTEQESGYCWRNFVNYSPSNEAHWPRYPHLWVRLYVLELYCIILGLPPCLNILRRKQPQLTFFTIALQSCHYQRLPPHILWATGLKSGSETPGTSESATPESAMERELVLGIAYGGKYTGLAVVDRRHNQVLYANRLKMRDDVAGILKDRRKQRGIRRTAQTKKKRLRELKNYLKSIGYNESTATFETVYSLAHKRGYDYADMPEEKTSEEIEAMDVEERKQWEKEKQEWEETKRNSRHRKEVVKDVHKAMIEGRATEEQIKRVERIFNKQYRPKRFNNRILTKCKVEDCGVNTPLRKNVRDLLIENIVRFFPIEQSEKDNLKDAVLDKNRREEVKSFFRKHKTDEHIRKQVYDIADNKLSGRTVFCKEHILEHTEHSKEERKVFRLAPSLKTKIENVLAVIKDEILPKFTVNKVVMESNNFDIAAKTQGKKRLAKEEYGKGPREGKETRKEALLRETDGRCIYCGKSIDISNAHDDHIFPRKAGGLNIFANLVACCAVCNENKKGRTPLESGISPKPEIIAFMKNDLKKKILEDARNINTVDFNKYMSHASIGWRYMRDRLRESAGNKKLPIERQSGIYTAYFRRWWGFKKERGNTLHHALDAVILASRKGYSDDGLVDMTLKPKYNKGGEFDPEKHLPEPIEFKMDKGSRGSALHDRNPLSYKKGIITRRFMVTEIECGKEDDVISETYREKLKEAFKRFDTKKGKCLTDKEAKEAGFCIKKNELVMSLKCSIKGTGPGQMIRINNNVFKTNVHNVGVDVYLDEKGKKKAYERKNPRLSKHFIEPPPQPNGRVSFTLKRRDMVTVEGEDAIYRIKKLGTSPTIEAVVGSDGKTRTVSATKLTKANSAELEGSGGSTNLSDIIEKETGKQLVIQESILMLPEEVEEVIGNKPESDILVHTAYDESTDENVMLLTSDAPEYKPWALVIQDSNGENKIKMLSGGSPKKKRKV

SEQ ID NO: 588 - protein, 1592 aa, synthetic construct
MGSSHHHHHHMNEQTSTDEQFMQQALALADEAERQGEVPVGALLVHQGTVIGRGFNQVITQLDPSAHAEMLAIRDAARYLQNYRILDTTLYVTLEPCPMCAGALVHARVKRLVYGASDPRTGACGSVFNVVADTRLNHQLEVVAGVLGSQCGERLSAFFRQRRAAQKALKKAAQNFQSPSSGGSSGGSSGSETPGTSESATPESSGGSSGGSMDKKYSIGLAIGTNSVGWAVITDEYKVPSKKFKVLGNTDRHSIKKNLIGALLFDSGETAEATRLKRTARRRYTRRKNRICYLQEIFSNEMAKVDDSFFHRLEESFLVEEDKKHERHPIFGNIVDEVAYHEKYPTIYHLRKKLVDSTDKADLRLIYLALAHMIKFRGHFLIEGDLNPDNSDVDKLFIQLVQTYNQLFEENPINASGVDAKAILSARLSKSRRLENLIAQLPGEKKNGLFGNLIALSLGLTPNFKSNFDLAEDAKLQLSKDTYDDDLDNLLAQIGDQYADLFLAAKNLSDAILLSDILRVNTEITKAPLSASMIKRYDEHHQDLTLLKALVRQQLPEKYKEIFFDQSKNGYAGYIDGGASQEEFYKFIKPILEKMDGTEELLVKLNREDLLRKQRTFDNGSIPHQIHLGELHAILRRQEDFYPFLKDNREKIEKILTFRIPYYVGPLARGNSRFAWMTRKSEETITPWNFEEVVDKGASAQSFIERMTNFDKNLPNEKVLPKHSLLYEYFTVYNELTKVKYVTEGMRKPAFLSGEQKKAIVDLLFKTNRKVTVKQLKEDYFKKIECFDSVEISGVEDRFNASLGTYHDLLKIIKDKDFLDNEENEDILEDIVLTLTLFEDREMIEERLKTYAHLFDDKVMKQLKRRRYTGWGRLSRKLINGIRDKQSGKTILDFLKSDGFANRNFMQLIHDDSLTFKEDIQKAQVSGQGDSLHEHIANLAGSPAIKKGILQTVKVVDELVKVMGRHKPENIVIEMARENQTTQKGQKNSRERMKRIEEGIKELGSQILKEHPVENTQLQNEKLYLYYLQNGRDMYVDQELDINRLSDYDVDHIVPQSFLKDDSIDNKVLTRSDKNRGKSDNVPSEEVVKKMKNYWRQLLNAKLITQRKFDNLTKAERGGLSELDKAGFIKRQLVETRQITKHVAQILDSRMNTKYDENDKLIREVKVITLKSKLVSDFRKDFQFYKVREINNYHHAHDAYLNAVVGTALIKKYPKLESEFVYGDYKVYDVRKMIAKSEQEIGKATAKYFFYSNIMNFFKTEITLANGEIRKRPLIETNGETGEIVWDKGRDFATVRKVLSMPQVNIVKKTEVQTGGFSKESILPKRNSDKLIARKKDWDPKKYGGFDSPTVAYSVLVVAKVEKGKSKKLKSVKELLGITIMERSSFEKNPIDFLEAKGYKEVKKDLIIKLPKYSLFELENGRKRMLASAGELQKGNELALPSKYVNFLYLASHYEKLKGSPEDNEQKQLFVEQHKHYLDEIIEQISEFSKRVILADANLDKVLSAYNKHRDKPIREQAENIIHLFTLTNLGAPAAFKYFDTTIDRKRYTSTKEVLDATLIHQSITGLYETRIDLSQLGGDGSGGSPKKKRKV

SEQ ID NO: 589 - protein, 1588 aa, synthetic construct
MGSSHHHHHHMPQSEQDIYWIRYAMQLAERAEQAGEVPVGAVLVLDNQALGEGWNLSISRHDPCAHAEIMAIRQAGERIGNYRLLGATLYVTLEPCVMCAGAMVHSRIARVVYGASDLKTGAAGSVFDVLSDPRHNHVVEITGGVESEACSQQLSDFFRRRRAEQKAEKQRLKDNQSGGSSGGSSGSETPGTSESATPESSGGSSGGSMDKKYSIGLAIGTNSVGWAVITDEYKVPSKKFKVLGNTDRHSIKKNLIGALLFDSGETAEATRLKRTARRRYTRRKNRICYLQEIFSNEMAKVDDSFFHRLEESFLVEEDKKHERHPIFGNIVDEVAYHEKYPTIYHLRKKLVDSTDKADLRLIYLALAHMIKFRGHFLIEGDLNPDNSDVDKLFIQLVQTYNQLFEENPINASGVDAKAILSARLSKSRRLENLIAQLPGEKKNGLFGNLIALSLGLTPNFKSNFDLAEDAKLQLSKDTYDDDLDNLLAQIGDQYADLFLAAKNLSDAILLSDILRVNTEITKAPLSASMIKRYDEHHQDLTLLKALVRQQLPEKYKEIFFDQSKNGYAGYIDGGASQEEFYKFIKPILEKMDGTEELLVKLNREDLLRKQRTFDNGSIPHQIHLGELHAILRRQEDFYPFLKDNREKIEKILTFRIPYYVGPLARGNSRFAWMTRKSEETITPWNFEEVVDKGASAQSFIERMTNFDKNLPNEKVLPKHSLLYEYFTVYNELTKVKYVTEGMRKPAFLSGEQKKAIVDLLFKTNRKVTVKQLKEDYFKKIECFDSVEISGVEDRFNASLGTYHDLLKIIKDKDFLDNEENEDILEDIVLTLTLFEDREMIEERLKTYAHLFDDKVMKQLKRRRYTGWGRLSRKLINGIRDKQSGKTILDFLKSDGFANRNFMQLIHDDSLTFKEDIQKAQVSGQGDSLHEHIANLAGSPAIKKGILQTVKVVDELVKVMGRHKPENIVIEMARENQTTQKGQKNSRERMKRIEEGIKELGSQILKEHPVENTQLQNEKLYLYYLQNGRDMYVDQELDINRLSDYDVDHIVPQSFLKDDSIDNKVLTRSDKNRGKSDNVPSEEVVKKMKNYWRQLLNAKLITQRKFDNLTKAERGGLSELDKAGFIKRQLVETRQITKHVAQILDSRMNTKYDENDKLIREVKVITLKSKLVSDFRKDFQFYKVREINNYHHAHDAYLNAVVGTALIKKYPKLESEFVYGDYKVYDVRKMIAKSEQEIGKATAKYFFYSNIMNFFKTEITLANGEIRKRPLIETNGETGEIVWDKGRDFATVRKVLSMPQVNIVKKTEVQTGGFSKESILPKRNSDKLIARKKDWDPKKYGGFDSPTVAYSVLVVAKVEKGKSKKLKSVKELLGITIMERSSFEKNPIDFLEAKGYKEVKKDLIIKLPKYSLFELENGRKRMLASAGELQKGNELALPSKYVNFLYLASHYEKLKGSPEDNEQKQLFVEQHKHYLDEIIEQISEFSKRVILADANLDKVLSAYNKHRDKPIREQAENIIHLFTLTNLGAPAAFKYFDTTIDRKRYTSTKEVLDATLIHQSITGLYETRIDLSQLGGDGSGGSPKKKRKV

SEQ ID NO: 590 - protein, 16 aa, synthetic construct
SGSETPGTSESATPES

SEQ ID NO: 591 - protein, 17 aa, synthetic construct
SGSETPGTSESATPESA

SEQ ID NO: 592 - protein, 32 aa, synthetic construct
SGGSSGGSSGSETPGTSESATPESSGGSSGGS

SEQ ID NO: 593 - protein, 34 aa, synthetic construct
GTSGGSSGGSSGSETPGTSESATPESSGGSSGGS

SEQ ID NO: 594 - protein, 206 aa, Cebus imitator
MEASPASRPRPLMGPRTFTENFTNNPEVFGRHQTYLCYEVKCQGPDGTRDLMTEQRDFLCNQARNLLSGFDGRHAERCFLDRVPSWRLDPAQTYRVTCFISWSPCFSCAREVAEFLQENPHVNLRIFAARIYDCRPRYEEGLQMLQNAGAQVSIMTSEEFRHCWDTFVDHQGHPFQPWEGLDEHSQALSRRLQAILQGNRWMILSL

SEQ ID NO: 595 - protein, 167 aa, unidentified
MSEVEFSHEYWMRHALTLAKRARDEREVPVGAVLVLNNRVIGEGWNRAIGLHDPTAHAEIMALRQGGLVMQNYRLIDATLYSTFEPCVMCAGAMIHSRIGRVVFGVRNAKTGAAGSLMDVLHYPGMNHRVEITEGILADECAALLCYFFRMPRRVFNAQKKAQSSTD

SEQ ID NO: 596 - protein, 747 aa, unidentified
MERELVLGIDYGGKYTGLAVVDRRHNQVLYANRLKMRDDVAGILKDRRKQRGIRRTAQTKKKRLRELKNYLKSIGYNESTATFETVYSLAHKRGYDYADMPEEKTSEEIEAMDVEERKQWEKEKQEWEETKRNSRHRKEVVKDVHKAMIEGRATEEQIKRVERIFNKQYRPKRFNNRILTKCKVEDCGVNTPLRKNVRDLLIENIVRFFPIEQSEKDNLKDAVLDKNRREEVKSFFRKHKTDEHIRKQVYDIADNKLSGRTVFCKEHILEHTEHSKEERKVFRLAPSLKTKIENVLAVIKDEILPKFTVNKVVMESNNFDIAAKTQGKKRLAKEEYGKGPREGKETRKEALLRETDGRCIYCGKSIDISNAHDDHIFPRKAGGLNIFANLVACCAVCNENKKGRTPLESGISPKPEIIAFMKNDLKKKILEDARNINTVDFNKYMSHASIGWRYMRDRLRESAGNKKLPIERQSGIYTAYFRRWWGFKKERGNTLHHALDAVILASRKGYSDDGLVDMTLKPKYNKGGEFDPEKHLPEPIEFKMDKGSRGSALHDRNPLSYKKGIITRRFMVTEIECGKEDDVISETYREKLKEAFKRFDTKKGKCLTDKEAKEAGFCIKKNELVMSLKCSIKGTGPGQMIRINNNVFKTNVHNVGVDVYLDEKGKKKAYERKNPRLSKHFIEPPPQPNGRVSFTLKRRDMVTVEGEDAIYRIKKLGTSPTIEAVVGSDGKTRTVSATKLTKANSAE

SEQ ID NO: 597 - protein, 747 aa, unidentified
MERELVLGIAYGGKYTGLAVVDRRHNQVLYANRLKMRDDVAGILKDRRKQRGIRRTAQTKKKRLRELKNYLKSIGYNESTATFETVYSLAHKRGYDYADMPEEKTSEEIEAMDVEERKQWEKEKQEWEETKRNSRHRKEVVKDVHKAMIEGRATEEQIKRVERIFNKQYRPKRFNNRILTKCKVEDCGVNTPLRKNVRDLLIENIVRFFPIEQSEKDNLKDAVLDKNRREEVKSFFRKHKTDEHIRKQVYDIADNKLSGRTVFCKEHILEHTEHSKEERKVFRLAPSLKTKIENVLAVIKDEILPKFTVNKVVMESNNFDIAAKTQGKKRLAKEEYGKGPREGKETRKEALLRETDGRCIYCGKSIDISNAHDDHIFPRKAGGLNIFANLVACCAVCNENKKGRTPLESGISPKPEIIAFMKNDLKKKILEDARNINTVDFNKYMSHASIGWRYMRDRLRESAGNKKLPIERQSGIYTAYFRRWWGFKKERGNTLHHALDAVILASRKGYSDDGLVDMTLKPKYNKGGEFDPEKHLPEPIEFKMDKGSRGSALHDRNPLSYKKGIITRRFMVTEIECGKEDDVISETYREKLKEAFKRFDTKKGKCLTDKEAKEAGFCIKKNELVMSLKCSIKGTGPGQMIRINNNVFKTNVHNVGVDVYLDEKGKKKAYERKNPRLSKHFIEPPPQPNGRVSFTLKRRDMVTVEGEDAIYRIKKLGTSPTIEAVVGSDGKTRTVSATKLTKANSAE

SEQ ID NO: 598 - skipped

SEQ ID NO: 599 - protein, 197 aa, unidentified
MAAVTDRDLAPRENNQRWKIRPNDFKRNYLPGQHPKVVYLLYEIRWSRGTIWRNWCSNNSTQHAEVNFLENCFKAMPSVSCSITWVLSTTPCGKCSRRILEFLRVHPNVTLEIYAAKLFKHLDIRNRQGLRNLAMNGVIIRIMNLADYSYGWKRFVAYQRGEDDYWPWSFASYILLNWIELYHILSGLPPLLANFKY

SEQ ID NO: 600 - protein, 194 aa, unidentified
MAAVADRDAAPRENIQGWKLQPNDFKRNYLPGQHPKVVYLLYEIRWSRGTIWRNWCSNNSTQHAEVNFLENCFKATPSVSCSITWVLSTTPCGKCSRRILEFLRVHPNVTLEIYAAKLFKHLDIRNRKGLRDLAMNGVIIRIMNLSDYSYCWKTFVAYQHGKEDYWPWSFASYIFLNQAELSHILLGLPPLLAN

SEQ ID NO: 601 - protein, 203 aa, unidentified
MAAVTDRDPAPRRNNQGWKIQPNDFKRNYLPDHHPEVVYLLYEIRWRRGTIWRNWCSNNSSQHAEVNFLENCFKATPSVSCSITWVLSTTPCGKCSKRILDFLRVHPNVTLEIYAAKLFKHLDIRNRQGLRNLALTGVAIRIMNLADYSYCWKTFVAHEHGQGDYWPLSFASYIFLNSTELSHILLVSRHLNKMLRVKSNAKS

SEQ ID NO: 602 - protein, 192 aa, unidentified
MAAVPDRGPAARENNQRWKILPDDFIRNYFPDQHPNAVYVLYEIRWSRGTIWRSWCSNSFDQHAEVNFLENYFKARPSASCSITWFLSTTPCGRCSRRILEFLRAHPNVTLEIYAAKLFKHLDIRNRQGLKNLAMNGVIIRIMDLPDYSYCWKTFVAYQRAEDIYWSWRFKSYIFLNCMELYRILLGLPPLL

SEQ ID NO: 603 - protein, 196 aa, unidentified
MAAVSNRGRAPRQNNQRWKMQPDDFKSNYLPSQHPKVVYLMYAIKWRRGTIWRGWCSNNPTQHAEVNFLENCFKPLSSASCSITWVLSTTPCGKCSKRILEFLRIHPNVTLKIFAAKIFKHLDIRNRQGLRNLTEKGVIIRIMSPADYSSSWKRFVAYQHGEEDYWPWNFILHILLNCIELHRIILGLPPVLNLEY

SEQ ID NO: 604 - protein, 196 aa, unidentified
MAADIGRGRALTQNNQRWKIQPDDFKSNYLPSQHPKVVCLLYAIKWRRGKVWKGWCTNNSTQHAEVNFLENCFKPLSSASCSITWVLSTTPCGKCSRRILEFLRIHPNVTLEIFAAKIFKHLDIRNRQGLRNLMMKGVIIRIMRPADYSYSWKKFVAYQHGEEDYWPWSFSLYILLNCIELKRIILGLPPVSNFEY

SEQ ID NO: 605 - protein, 178 aa, unidentified
MWKIQPGDFQRNYSPSQKAQVVYLLYEIRWRRRSVWRNWCSNNPGQHAEINFLENHFNDRRQAPCSITWFLSTSPCGNCSRRILEFLRSHPNVTLKIYAARLFKHHDAHNRHGLHSLMMNGVAVHIMNPEDYSYCWRNFVEYQPGEDHYQPQNVILYFFLNFTELFHIFLGFPPLLPN

SEQ ID NO: 606 - protein, 193 aa, unidentified
MAAVSARGPSSRENNQGWKMQPEDFQRNYSPRQNGRVYLLYEIRWRSSSIWRNWCSNNPEQHAEVNFLENHFNNQPQTPCCITWFLSASPCGNCCRRILKFLRSHPNVTLVICAAKLFRHLDIRNRRGLRSLMMNGVAIRIMNLEDYRYCWRNFVAHQPGQDDYWPQNVTLYFILNSIELLHIFLDLPPFLAN

SEQ ID NO: 607 - protein, 184 aa, unidentified
MYRRRMRGMHISKRALRKHFDPREYPKETYLLCKLEWRGGIRSWKHWVRNDDVNDCHAEQYFLEEIFEPRCYNICDMTWYLSYSPCWKCCDVIRDFLEEQTNVNIYIHVARLYYVNHPNNCRALRELNSLENVTIEAMEAEDYDYCRDTFIQRGVHCDFSPTRFQSEIQRNRVKLEDILQDLHL

SEQ ID NO: 608 - protein, 193 aa, unidentified
MYISKRALRKHFDPREYPKETYLLCELKWRGGVRSWQHWVRNDDYNDCHAEQYFLEEIFEPRYYNICDMTWYLSYSPCWECCDVIRDFLEEQTNVNICIHVARLYYVNYPINCQALRELNRLEKVTIKAMEAEGKVSHALWGWGGVNYLASISPDYDYCRETFIQRDVHCDFSPKRFQSEIQRNRVKLEDILQ

SEQ ID NO: 609 - protein, 183 aa, unidentified
MYRRKTRGMYISKRALRKHFDPREYPRETYLLCELKWRGGARSWKHWVRNEDDNYHAEQYFLEEIFEPRSYNTCDMTWYLSYSPCWKCCQVIEGFLEEQRNVNIDIRVARLYYVKDPRNCMALRELRRFQGVRITAMEAEDYDYCWDTFIQPDVNYDFSPKKFKSEIQRNRVKLEDIFQGLHL

SEQ ID NO: 610 - protein, 185 aa, unidentified
MYRKKMRGMYISKKALKTQFDPFKFPRETYLLCKLRWGESDRSWIHWVKNYPGDYYHAEVYFLEKIFRMKPYNNVKCSITWYLSWSPCVNCCCEIVYFLERHENVNIDIHVARLYFKDSERTRRGLKKLARSAQVNISVMNMEDYKDCSKNFIQGGADDFWTVNFESEITKNCLKLWDILEDLHL

SEQ ID NO: 611 - protein, 197 aa, unidentified
MYKKKLKGMYVSKKALKNHFDPRNTPRDTYLLCKLQWGETGTPWIHWVRKDRYHAEVYFLEKIFKMKRSNNYVNCSITWYLSWSPCADCCHKILKFLKKHSNVNIDIHVARVYYAEDEKVRQGLKNLVSLAKVTIAVMETKDYTDCWKNFIQGGADGGFQTVDFQLAVEVNRLKLKNIFEDLPLIEYLSLEGTHEDH

SEQ ID NO: 612 - protein, 217 aa, unidentified
MYKKKLRGRATENKVVTSHSLKFLFCFSMYISKKALKNHFDPRNTPRDTYLLCKLQWGETGTPWIHWVRNDHYHAEVYFLEKVFKMKRSNNYVNCSITWYLSWSPCADCCHEILKFLKKHSNVNIDIYVARVYYADDEDSRQGLKNLVSLAEVTIAVMEMQDYTDCWKNFIQGGTDGGFWTEGFQSAVKKNRLKLKNMFEDLPLIEYLSLEGTHEDH

SEQ ID NO: 613 - protein, 204 aa, unidentified
MYVSKNVLKYHFDPYETPQDTYLLCKLQWGETGTPWIHWVKNDRYHAEVYFLKKIFKMRRSNNYVNCSVTWYLSWSPCVNCCRKILNFLKKHSNVNIDMHVARLYYIEDERIRQGLKNLVSLAKVTIAVMEIEDYTYCWKNFIQGDVDDDAWTVGFQPKINKNRLKLKDVLEEEEICTRITLSQMENPALALLKFHTVDDCPAL

SEQ ID NO: 614 - protein, 172 aa, unidentified
MYISMKALKYNFDPRETPQDTYLLCKLQWGETGTPWIHWVKNDHCHAEVYFLEKIFKTRRSNNYVKCSITWYLSWSPCADCCRTILNFLKKHSYVYIDIHVARLYYIEDEKIQQGLKKLVSLAAVTITVMEIEDYIYCWKNFLQRDIDDDYWTVGFQPKITKNYLKLKDVIE

SEQ ID NO: 615 - protein, 179 aa, unidentified
MRKETGMYISKAALKHNFNPHETPKDTYLLCKLQWGETGTPWIHWVRNERYHHAESYFLEKIFKMRRSSNYVKCNITWYLSWSPCADCCHKILNFLKRHSNVNIDIYVARLYYIEDEEIRQCLKNLVSLAEVTIAVMKIEDYIYCQKKFIQGGDDDDSWTVSFQPEISKNRLKLKDVFE

SEQ ID NO: 616 - protein, 178 aa, unidentified
MYISKKALTEQFDPRNSPRETYLLCKLQWGETGIPWTHWVRNDRDNKVHAEVYFLKNIFQRRRSNNYVNCSITWYLSWSPCVNCCYKIRDFLNRHSYVTIRIYVARLCYRGFHRNRKGLRNLVSLREVTVNVMEIKDYEDCWKVFIQGDGYDDSWTVGFQPEIIKNRMKLSNIKENLY

SEQ ID NO: 617 - protein, 195 aa, unidentified
MEKRSAGGLAGRGEARRKKKLRGMYISKKALKHHFDPYEGLKETYLLCELKWGKAKKSWKHWVRNDHDHAEVIFLEKIFNVRRFNSRDTCSITWYLSWSPCARCCYKILDFLKEHSYVNLHIYVARLYCIEDEKTRRGLKKLNSLEGVTIAVMEEEEYTYCRKTFIQGDVGDDFWTRDFEPKITENRLKLKEVLK

SEQ ID NO: 618 - protein, 183 aa, unidentified
MYKKKLRGMYMSKKAFKYHFDPRESPRATYLLCVIQWGCNGLPWIHWVKNGRSHAERYFLQKVFKMRRSNNNINCSITLYLSWSPCRNCCYEMQYFLKKHPNVNICIYLARLYYTEDEEICKALKDLSEKKVIISVMKIEDYIYCWKTFVSGNAAAGSWFKDFESQINKNHFQLKRILEVSPL

SEQ ID NO: 619 - protein, 182 aa, unidentified
MPRRGFRGMYISKWALREHFDPRKYPRETYLLCELEWGRSSNFWQHWVRNDNDYHAEEYFLENIFEPRNNNFCNITWYLSYSPCPGCCQVIQDFLETHHNVNIDIRVARLYYADTASNRQGLRELHSSQGVTIDVMEEQDYKYCWETFIAGDVSYDFTPVDYQLEIWRNHLRLRTILTGRHY

SEQ ID NO: 620 - protein, 224 aa, unidentified
MCLGTETETNVRLIKRHPSLKRQQTNPEISMAAVADRGAAPRENIQGWKLQPNDFKRNYLPGQHPKVVYMLYEIRWSRGTIWRNWCSNNSTQHAEVNFLENCFKATPSVSCSITWVLSTTPCGKCSRRILEFLRVYSNVTLEIYAAKLFKHLDIRNRQGLRDLAMNGVIIRIMNLSDYSYCWKRFVAYQHGEEDYWPWSFTSYIFLNQTELSHILLGLPPLLAN

SEQ ID NO: 621 - protein, 193 aa, unidentified; identical to SEQ ID NO: 606

SEQ ID NO: 622 - protein, 192 aa, unidentified; identical to SEQ ID NO: 602

SEQ ID NO: 623 - protein, 203 aa, unidentified
MAAVADRGAAPRENIQGWKLQPNDFKRNYLPGQHPKVVYMLYEIRWSRGTIWRNWCSNNSTQHAEVNFLENCFKATPSVSCSITWVLSTTPCGKCSRRILEFLRVYSNVTLEIYAAKLFKHLDIRNRQGLRDLAMNGVIIRIMNLSDYSYCWKRFVAYQHGEEDYWPWSFTSYIFLNQTELSHILLVSRHLKKTLREKSSAKS

SEQ ID NO: 624 - protein, 375 aa, unidentified
MYRKKMRGMYISKKALKNQFDPSKFPRETYLLCKLRWGESESSWIHWVKNYRYDYYHAEVYFLEKIFRMKPYNNVNCSITWYLSWSPCVNCCNEILDFLERHENVNIDIHVARLYFKDSERTRRGLKKLARLAQVNINVMDMEDYKDCSKTFIQGGAPDDFWTVNFESEITENCLKLWDILEVTHKTRNIHGCGQWQRWKIKPKDFKRNYLPDRHSRVVYLLYEIRWRNGSIWRNWFSNNRSQHAEVNFLENCFSDVPPAPCSITWFLSTSPCGKCSERILEFLRTHRNVTLEIYTAKLFRHLDMRNRQGLCNLVMNGVAIRIMNLPDYRYCWKRFVAYQHGEDDYWPQNFAAYIFLNWRELGHIFLGLPPLLPY

SEQ ID NO: 625 - protein, 177 aa, unidentified
MQPDDFKSNYLPSQHPKVVCLLYAIKWRRGTIWRGWCTNNSTQHAEVNFLENCFKPLSSVSCSITWVLSTTPCGKCSKRILEFLRIHPNVTLEIFAAKIFKHLDIRNRQGLRNLMMKGVIIRIMRPADYSYSWKKFVAYQHGEEDYCPWSFSLYILLNCIELERIILGLPPLSNFEY

SEQ ID NO: 626 - protein, 190 aa, unidentified
MAAVTDRDPAPSRNNQGWKIQPNDFKRNYLPDHHPEVVYLLYEIKWRRGTIWRNWCSNNSSQHAEVNFLENCFKATPSVSCSITWVLSTTPCGKCSKRILDFLRVHPNVTLEIYAAKLFKHLDIRNRQGLRNLARTGVTIRIMNLADYSYCWKTFVAHEHGQGDYRPLSFASYIFLNSTELSHILWVAVY

SEQ ID NO: 627 - protein, 196 aa, unidentified; identical to SEQ ID NO: 603

SEQ ID NO: 628 - protein, 333 aa, unidentified
MYISRRALGYHFDPRVSPRDTFLLCRLQWGARGRRWKHWVRKDRHHAEVYFLEKIFEPRRFNNAHCSITWYLSWSPCANCCYRIVQFLMKHSYVSIDIRVARLYFIEDETTRQGLEELVSCARVRLTVMDTEGKVPFVLWNWEGVNWWKIEPDEFKTNYSPDHRPRVVYLLYEIRWRRGTIWRNWCSNNIDQHAEVNFLENCFKAKPSVSCSITWFLSTAPCAKCSRRILKFLTAHPKVTLEIYAAKLFRHLEIRNRQGLMDLAVNGVILRIMNLADYSYCWKQFVAYQRGQEVYWPQSFSPYIFLNWRELHHILLVSRYLKRTLPVKSNGRS

SEQ ID NO: 629 - protein, 196 aa, unidentified
MAAVSNRGRAPRQNNQRWKMQPDDFKSNYLPSQHPKVVYLLYEIKWCRGTVWRGWCSNNSTQHAEVNFLENCFKPLSSVSCSITWVLSTTPCGKCSKRILEFLRIHPNVTLEIFAAKIFKHLDNRNRQGLRNLMMKGVIIRIMCPADYSYSWKRFVAYQHGEEDYWPRSFSLYILLNCIELERIIWGLPPLSNFEY

SEQ ID NO: 630 - protein, 374 aa, unidentified
MYRRKMRGMYISKRALRIHFDPCKFPKETYLLCELQWRGSTKFWQHWVRNDHDYEDCHAEQYFLDEVFEPRSYNICDMTWYLSWSPCRECCDIIRDFLEEQPNVNIDIRVARLYYTNIPRYRDGLRELHSLEGVTIKAMEAEDYNYCWETFIQPGVNYYFSPNNFKSEIQRNRTKLEDILQGLHLYARITVLLVLFFRWKMQPRDFQRNYSPRQNGRVYLLYEIRWRRGSIWRNWCSNNHEQHAEVNFLENHFSVRPQTPCSITWFLSTSPCGKCSRRILEFLRSHPNVTLVIYAAKLFRHHDNRNRQGLRNLIMNGVTLRIMNLEDYRYCWRNFVAYQTGEDDYWPQNVTLYFLLNSTELLHIFWGLPPFLAN

SEQ ID NO: 631 - protein, 178 aa, unidentified
MIHKSFLHRSCTQTEQPKVVYLMYAIKWRRGTIWRGWCSNNPTQHAEVNFLENCFKPLSSASCSITWVLSTTPCGKCSKRILEFLRIHPNVTLKIFAAKIFKHLDIRNRQGLRNLTEKGVIIRIMSPADYSSSWKRFVAYQHGEEDYWPWNFILHILLNCIELHRIILGLPPVLNLEY

SEQ ID NO: 632 - protein, 239 aa, unidentified
MLDGRSLRDLSSGIETETNVRLIKEHPSVKGHLSPKRRRTNPEISMAAVTGRGSAPRPSNQRWKIQPNEFKRNYLPDKHPKVVYLLYEIRWRKGTTWRNWCSNNSTQHAEVNFLENCFKAMPSASCSITWVLSTTPCGKCSRRILEFLRVHPNVTLEIYAAKLFRHLDIRNLQGLRSLSTNGVIIRIMNLSDYSYCWKRFVAYQHGEDDYWPWSFSSYIFLNCMELFHILSGLPPLWEN

SEQ ID NO: 633 - protein, 190 aa, unidentified
MAAVTDRDPAPRRNNQGWKIQPNDFKRNYLPDHHPEVVYLLYEIRWRRGTIWRNWCSNNSSQHAEVNFLENCFKATPSVSCSITWVLSTTPCGKCSKRILDFLRVHPNVTLEIYAAKLFKHLDIRNRQGLRNLALTGVAIRIMNLADYSYCWKTFVAHEHGQGDYWPLSFASYIFLNSTELSHILLDAVY

SEQ ID NO: 634 - protein, 194 aa, unidentified
MAAVTDRDPAPRENNQRWKIQPKDFKRNYLPNQHPKMVCLLYEIRWSRGTIWRSWCSNNSTQHAEANFLKNCFKAKPSVSCSITWVLSTTPCGECSRRILDFLSVYPNVTLEIYAAKLFKHLDNRNRQGLQNLANNRVSIRIMNLEDYNYYWKRFVAYQHGEDDYWPWSFAPYIFLNWTELCHILLGLPPMLAN

SEQ ID NO: 635 - protein, 207 aa, unidentified
MAAVTDRDPAPSRNNQGWKIQPNDFKRNYLPDHHPEVVYLLYEIKWRRGTIWRNWCSNNSSQHAEVNFLENCFKATPSVSCSITWVLSTTPCGKCSKRILDFLRVHPNVTLEIYAAKLFKHLDIRNRQGLRNLARTGVTIRIMNLADYSYCWKTFVAHEHGQGDYRPLSFASYIFLNSTELSHILWDLAPLPLRSVMQLPPFKCSCF

SEQ ID NO: 636 - protein, 203 aa, unidentified
MAAVTDRDPAPRQNNQRWKIQPEYFKRNYLPNQHPKAVCLLYEIRWSRGTIWRNWCSNRSTQHAEVNFLENCFKANPSVSCSITWFLSTTPCGICSRRILDFLSGYPNVTLEIYAAKLFKHLDNRNRQGLWNLANNRVIIHIMSLSDYSYCWKRFVAYQNGEDDYWPWSFAPYIFLNWTELCHILLVSRHLKKTLRVKSNAKS

SEQ ID NO: 637 - protein, 188 aa, unidentified
MAAVTDRDPAPRESNRGWKIQPNDFKRNYLPGQHPKVVYLLYEIRWSRGTIWRNWCSNNSTQHAEVNFLENCFKAMPSVSCSITWVLSTTPCGKCSRRILEFLRVHPSVTLEIYAAKLFKHLDIRNRQGLRNLAMNGVIIHIMNLADYSYWWKIFVAYRHGEEGYWPWSFASYIFLNQTELCHILLPS

SEQ ID NO: 638 - protein, 196 aa, unidentified
MAAVIGRGRAPRQNNQRWKMQPDDFKSNYLPSQHPKVVCLLYAIKWRRGTIWRGWCTNNSTQHAEVNFLENCFKPLSSVSCSITWVLSTTPCGKCSKRILEFLRIHPNVTLEIFTAKIFKHLDIRNRQGLRNLMMKGVIIRIMRPADYSYSWKKFVAYQHGEEDYCPWSFSLYILLNCIELERIILGLPPLSNFEY

SEQ ID NO: 639 - protein, 236 aa, unidentified
MFLAKFEEYSRKERNGANGQSAQLGLRYSLKGTINTLYKSFTVPRHPKLNEHTEQQIFTYIVSFLDFHKKKDETLTIYEIQIISHLSPCTDCAKKLAELPEALSKYHTHDSSQATYSIGSHGIFHRPAATLPEVNTELATSIKTMTSAKWKIEAVDEIPSLMLKPADMNSLDYFMLTTKDKPELRKKIAGINWDFRKAVAAELKLKEAAAASSASSQPAAAANSLMNPSPAVSNPK

SEQ ID NO: 640 - protein, 204 aa, unidentified
MTAMTEQDIAADANKTSLTLRVNGQPFAVCTSEAGIHAESYACNFLLAALGNQDRGASALLAEAEQGSRPGGLPDKGCYDIFLTRSPCGACTDRILQVHNLLPENRTLRLFCATVYRGTRNAESRANIVRLKGHGVPVLFWDAARMALAGDIDSATLLRVAHHLSLWDSREADGGRADHKLGSRMASPDLGLLPLDTNSIYYAK

SEQ ID NO: 641 - protein, 328 aa, unidentified
MPVGKYGTVYSESIAECQADKTSIIKTGYIFDPISMGGTANAFSLNDSQTLVVGLTKVGGYIFGRFCNSPGGSTVTYKIPNTVPQTGNHCEDFFMSAWDEVWDSPVMMELRVPYAIAARKLPVTLKLTKSPCHICAQKLIAFAEGYQIDLRLKILKLYSGDKGEIVNATALLAMLSKGIGVKMWEVHVVKQDYTGLTKKGQNHELRVLKEHLRAAEQQSHFLLTADSVEDIEERTESEKLQRNLSLQAIKQKVDAMLKWQTDINQFQWRSLERIQKTLSEINAGNLHGESQKKEIQQVLLAISNTALLKDVDEEFQYLSESYYQSEKL

SEQ ID NO: 642 - protein, 325 aa, unidentified
MPRGKYGTYFTSKVESCISKDKPIVSGNYIFDPIDIGGGNNPFTLNSEYATVVLAKVCGIIFGRFCNNTGEPKKYKIGEETIIGDHSEDYFMATWEELWDEPIMKQIRALQDLQGKPIVITLKITKSPCDQCSKKLIKFIQHYNVNLRLKILRLYSGDQGPIVNSFALLSLASTGVAVKMWDVLAKEKGFQKKTKRGQTHEMKYMTQHLKSSFLMTIDEDDAVEEKEKSNIELLSDAFRKQILQMQEDSKQQLQKRLIEMNTKELHVKKTKAAIQKDFLQLSDGDYLYAISNMEDFLSPYLYSLVKEEKFSLELVCNAIGFDLCD

SEQ ID NO: 643 - protein, 319 aa, unidentified
MVWHVNDIDSAVANSQPLVCYQQHGQYFIDPAWAGGGNNPFTLNPDQYTVVLIAKVNGVFFGRFLNNGLPRTISEPTKPINPSLKPELGITKTSKQAIERAEEKKLKAIRQYKKDQVSYEKNLKNYNNYLVQVNAQTFNHSHGSGTHAEDAFLSAWDAAVKKGTIGQLKERCNNKLYVTIKLSKSPCQVCAPKLIAFKKKSNDIFLRIKTQAIYEGDGGINVNTLEIKKMIGEGIAVRSWHIPFHSNKHQKNGAKTKSGMLHELSGWAFDEDDAFHKLLLEDLNIKKAKFDNKMAKGASSYAPENLEQRYKELSRNYKG

SEQ ID NO: 644 - protein, 315 aa, unidentified
MWIFHTVDDVIERGSPIVANVQSQFQTPLIGGTANPYAAAISVEDDEKSYNVVSLVKLDGMIFGMFQMSTGPLPYEHSLGSSNHAEDGFISAFEMFTKTTFYDALTTVHEKLKKPISITLKQNKTPCETCAPKLVEFAKNYDLNIRIKAMIQYKGNNKSAQAATQSLVQSGIPVIPFNVPKRVGRKNYDTNRWGQPHELKYVKFDEQEIADGYMSGSIAELTRTMQNYKNAFSRKEQELAGVVASAIGANGSDQEIADAIAELYKSGDQRVKSTDTEFIKERLKVAAKVSMQIHGEIKQTETLAAQSGFGKALYL

SEQ ID NO: 645 - protein, 190 aa, unidentified
MNGELDWADATAYYGSGLEAHRKPLSEASMATYGLLACRFLKGDTEQVVNGDGDHAEQKLIRSSLWTEELDSALADWDPRSSPMLVLVALNRSPCGDCAHLLASALNHYNDRYALTTERQHFVLASLGYYHSNKATQHSARGLPQTFTTDKGMRALKEAGWKLCTLTFDAKTTRRGRELSTYLRQIRKHG

SEQ ID NO: 646 - protein, 165 aa, unidentified
MQNLSDNEWIAQTTYCVAELYSRGTQQTLDLGKFQSNGNGHAEDNLIAALVAQTTNGTIPHGTYDLLIILNRSPCTSLMPELKANHVPACMTRLIDLQTNGLGNGQWRFNIQLNYRHLYGGNPATNWNRALNAFGVQQGAASGMAIMHGEGFNDVSVAIEMSKLQ

SEQ ID NO: 647 - protein, 212 aa, unidentified
MSPADVLALQRTAGNGAAVLMLQRARRQNGDDPVAGSEQARMQAPRRPGEVIQRLEDLTDNEWNGQATTLSADLELNGQLAQELSKFRSGGGLHAEDRLIDRLGELVDQGNLAAGHYQLVININRSPCGTIGGGKGCAERLIDLAQRGLGGPPATHTFAIVIHARHLYGSCSEERAYSQLAVQQMQHAGIQLALDIGHFDTGAAKALSNLET

SEQ ID NO: 648 - protein, 189 aa, unidentified
MYSYQENAISRLSPNNTNHPKYQMDNRESATRQYNLISGINGDCIQGDFIYNRLITTEESSSTGYTTYAQVSFINEDDGNEVVIGTGISEDGVHAETEAIAGIQSFIDHSIDDEGTDASGTLSLIMRVSKSPCPACGQALIDFISNGHRGISFKLNIIADHLYHGSTLDEARQTISDMEAVGIIVSVTN

SEQ ID NO: 649 - protein, 311 aa, unidentified
MLSQTLSLTLRQTNNSMENIALLRNYYYKITRGDQGHFFGLYAGNYFLSIDEAMEALRQVGPIFARRQANIVSGPIKLEKQVSNEKFLAGSDGKLVKKRREETEERRIIHKFKTNQMYSYQENAISRLSPNNTNHPKYQMDNRESATRQYNLISGINGDCIQGDFVYNRLTTTEESSSTGYTTYAQVSFINEDDDNEVVIGTGISEDGVHAETEAIAGIQSFIDHSIEEQQAAGDEQAADRGTLSLIMRVSKSPCPACGQALIDFISNKYNGVSLQLSIIADHLYHGSTLDEARQTISDMEAVGIIVSVTN

SEQ ID NO: 650 - protein, 359 aa, unidentified
MTFLRMDIPDGPLAGRPVRSRMDGVHPVHGRVLALQRAAGNAATTSALGTVQRSVVDEIARMKPDQLVVALQELNPKAAATNLWVTVDGKPVTELISRPAGFESLWPIQSGRGPHAEERFAQGVMPLLAARQPRYILLEITKSPCPSCTALLSQLVGEHPGTRFELHMLGLYPGAGEAEGERGAATRPEDLAELERKLQAKLLDLRAVIDRLTDEQWRKRFKYPKHTKIPIGTRIAALKFARSVHTTMVEARLKLGERQDQTAYGAKLKDLEDKFAELAAFLTAKKADATASARHEPYPAHETGRPTPAAETVTDLDRWTAIKAECPDLQLSEQTYGEYFLYSSHRAFTWFYVHNSLPE

SEQ ID NO: 651 - protein, 310 aa, unidentified
MYCERQINQESGIFSPSSLRKPQQYFEDKRAIQACFADWVSKLGQKPDIIFGKGSYGTGERLNLVQRKINYESLSKRVSLGEGEKNLESLISKLQDFYSRYGMKFKEKIRGWLEEINVQSDTWTLGDILRFLDARAKEEPIPIAPTEKGIAEVRLPFSMSAQRDFAFPAHTRAVAVFGQRMFEEQSSDGVHAEEQIVTRLQKLEAEVAELEVRERKLSITINNFPCLERCTPQIITLTTIFTTITIYYVIPYGGENFEAAARKLKSAGINLIPIDPRDYMTPEVKRDLTTDQAYRFEQAAKRRTLNPLPK

SEQ ID NO: 652 - protein, 368 aa, unidentified
MREHEVQSSKEQIRTEKTQNQQSSIGMAASVMQLQKSIGNRATTKLMQSNFSSAQLPIQRTIKYKSNCKAFGFEGGYHGDNKVSLETITKAVKEKFPNISQTTINGYVNEMNESDEAWTLNDIYRYFTQLNKETPVPMADHEIDEDILLPQNQDERLWYGFTTKTLLRGKVGDDLSYEFHSITKEDGSIHAEPQYIEKMESIIDDDFDSETPFIWTINNSPCGECVKKIIRFKKKHNLENFTIYFMNPYGGTKEEFKDSLKDLTEEGINLLPFDPRSYLTEDDKKTMTPEQEGRIEHALRKQIEYTKGTAIEVNPLENDDSVSSQSSLEQGMGDNDLFSREEEDEPRENKRKVAALVGAEENTKKKRK

SEQ ID NO: 653 - protein, 211 aa, unidentified
MAADRRLLKLHEALRRCPAPPPGRIVTMVARVAPALGVAIRDLPALDRGAGIPGGRVLPTWIDGAGALEIVTWNTGEASDLRRYGNRSHAEAQFFEFMRGRDFTSVDIEISHSPCTACADMLVGLLKSMKAKGTTVSRGPTRRVGQRVYVGAAIETPPVLPATLRWGALFETPPQATTPQSLRELQAVGWHMAAPRTAIPNDAGTPAITLL

SEQ ID NO: 654 - protein, 213 aa, unidentified
MAVDRRLLKLHEALRRCSGQPPGRIVTMVARVTPALGVGIRDLPALDRGAGIPGGRVLPTWIDGSGGGALEIVTWNTGEASDLRRYGNRSHAEAQFFEFMRDRDFTSVEIEISHSPCTACADLLAGLLKSMKAKGTTVSRGPTRRVGQRVYVGAAMETPPVIPATLRWGALFETPPQATTPQSLRALQAVGWHMAAPGTAIPNGAGTPAIRLL

SEQ ID NO: 655 - protein, 188 aa, unidentified
MAVDRRLLKLQEALRRCSAPPPGRVVTMVARVTPAPGVGIRDLPALDRGAGIPGGRVLPVWMDGSGALEIVTWNTGEASDLRRYGNRSHAEAQFFEFMRDREFKSVDIEISHSPCTACADMLAGLLKSMKAKGTAVTPGTNRRVGQRIYVGPAIETPPVLPATLRWGALFATPPQATTPQSLRALQAV

SEQ ID NO: 656 - protein, 186 aa, unidentified
MAWTQQNENCSWVAGEAPYIFDNEYTANFISGFRTVLIAKIEAEGVGNQPFGKFFNDSDGHAEANFLQALRANEWVFDAGYQEIVISINNSPCRQCCVLFKQYMEEIQVRFPNTTLVIETANIYHPNDPQDQACLRALSRLPGIRVELWNVALVNAQNQGPQVSPAQELARINKSLRTADVVRRMP

SEQ ID NO: 657 - protein, 250 aa, unidentified
MPECFDTLDTAFAAVARDKEKKRLWTILTFQGSNTFYLFWSAANAGQIVAGILNEDLPASDASLPTVLPNKALPQLKRGGVDKGHPEYEQNEINRQTVSKTKALRASVADVLAQQWKVNTWTFTGHAEERMLLNFGALYTQFAVASGQIPTVIIYNSDSPCTVDDPRASSFLQPRSCSAKLTHLAKRYPFAQFTIYYYKAYHGGGSASKDGASSSSSAGSTSPNFVSGDNIELLPFTPELRELCAQNNIK

SEQ ID NO: 658 - protein, 189 aa, unidentified
MGLSTQIAESFYDSKFSFTPGTMSGVVCVFTTALEKDNPFFIKSITFNYGAHIEQELMIELHKKFGEGLNTLPANSKIIFYQYWSPCRTCTDATIPDFLRRFGLIEKNIRVKFRFIDYYSKANVPNSTKQELWETNAEAQQAYDIACISSGHAKVKTNPTTPNQTIESMYLVIAPVGNNKTSFLMTVHQ

SEQ ID NO: 659 - protein, 198 aa, unidentified
MCSPLRELGKREREPSLTLRANFVGALGLSWRFIFEEAKNKWKYNNQIVGQGEGDCVAEIAMTDGSVVTGRYDEDKKGTHAEIMALSKIDQYDEIASITISSVPCPRCAVILERYNLSNKVIARPSDSTFGPSWHWPGTETELAFLLAGHVSDTIMKWSSLKTDVFGKFKGDSEWTKYPLKSTEFILDEVNKYDNQIK

SEQ ID NO: 660 - protein, 184 aa, unidentified
MYKKKLRGMYISKKALKHHFDPRKAPRDAYLLCRLQWGETGTPWTHWVKNDRYHAEVYFLEKIFKMRRSNNYVNCSIAWYLSWSPCVNCCRKILNFLQQHSYVNINIYVARLYYIDDDEIRRNLKNLMSLVNVTIAVMEIEDYTFCWENFIQGDVDDDSWTVGFQSELTKNRLKLQDMLEVSRV

SEQ ID NO: 661 - protein, 181 aa, unidentified
MYISKKALKHHFDPRKSPRDTYLLCKLQWGETGRPWIHWVRKDHCHAEVYFLEKILKIKRSNNYVNCSITWYLSWSPCAECCLKIQNFLERHSNVNIDIYVARLYYIEDEENRQGLKNLVSLEGVTIAVMKIEDYTRCWKTFIQGGDDYDDDSWTMGFQSKITENHRKLEDVFEDLPFVES

SEQ ID NO: 662 - protein, 185 aa, unidentified
MYKRKLRGMYVSKRALKHQFDPRNTPKETYLLCKLQWGEASIPWIHWVRNDNYHAEVYFLEKIFKTRRTNNYVNCSITWYLSWSPCENCCYKILNFLKKHSYVNIDIHIARLFCIRDERIRQGLKNLVRLADVKISVMEIEDYTDCWKIFIQGDDNDDSWTEGFQSEITKNRLKLKDVFEDLPCI

SEQ ID NO: 663 - protein, 205 aa, unidentified
MERSSGRDWLDECCPRGCKYTSNYRGPMKGLFQKAFYFHFENLHYADHRRKTFLCFEVTRLQDNKFRKGMFINQVGPYRLHAELRFLSWFHDSWLCPYASYEVTWYMSWSPCEECMEELAAFLANHRNVTLTIYVARLYYYQEPTCGEGLQALLNEGASVNIMFFRDFLDCWRRFVYNGNEYFEPWPHLHQNSLKYFHILEELLE

SEQ ID NO: 664 - protein, 207 aa, unidentified
MGTCGTAELCPFPGDNRGNEMSGSRGSECLLPRMGAEQMREDALPVLPAPPAGDLALLPLLSQVGPQRLHAELSFLSWFHDTQPSLDESYRVTWYVSWSPCDECAKEIAKFLANHHNVTLTIYAARIYYYWKPTYKEGLQALAEGGAQISIMSLPEFEECWNLFVCKKTFRPWKNFLECYLLQDKTLKEILSPAVSSRTTQPELPYH

SEQ ID NO: 665 - protein, 222 aa, unidentified
MSQDPVETAASRLPLSFRRRIEPWQFEACFDPRQLRKEACLLSEVRWGASPRTWRESCLNTARHVERNFIDKFASERRLQPSVRCSVTWFLSWSPCWECAGAIRAFLGQHPNVTLVICVARLFWHMEEQNRRGLGELLASGVRLQVMSESGNSSREGASREPGWRLPVQMGAGRPRQCDSSPRCLHGPQVALFPGARDGGQDFVRAVQALCPGAPHPEPQQS

SEQ ID NO: 666 - protein, 219 aa, unidentified
MASEKGPSSKDYTWRTVTWEFEVFFGPRELHKEACLLYEIKWGTSSRTWRSSGKNTTNHVEVNFVEKLTSERRLCPSTCCSTTWLLSWSPCWECSRAIREFLSQHPGMTLVIFVARLFQHMDHRNRQGLKDLVTSGVTIRVMSVSEYCYCWEFCQLPTRESSSVATVPTSWMTMCALELHCTILSLPPCSKISRRHQNQLTFFRLTPQHCYYQMIPPSF

SEQ ID NO: 667 - protein, 245 aa, unidentified
MSSDVVFCWSTGPSAGDTTLRRRIEPWEFKDSFDPHQLRKETRLLSEVWWGKSSRPWRESRQNATHHVEMNFIEKFTSERHLRPHVCCSITWFLSWSPCWECAKAIREFVSQHPKVRLVIYVARLYWHLDEQNRQGLRALVAGGVHVQIMSDSDYGYCWRNFVNYPPGQEAAWPRFLPVWTALYALELSCILLSLPPCLRISRRRQNQLTFFQVILKNCHYRAIPPLVLSAAGMMHPSVAWCWAE

SEQ ID NO: 668 - protein, 236 aa, unidentified
MASETGPSAGDPTLRRRIEPWEFEVFFDPRELRRETCLLYEIQWGTSHRRWRKSGKNTTNHAEVNFIEKLTSERQFCPSVRCSITWFLSWSPCWECSQAIQEFLSQHPNVTLVIYVARLYYHMDQRNRQGLRDLVNSGVTIQIMSVPEYCYCWRNFVNFPPGQEAHWPRYQPQWMALYELELHCIILSLPPCLKISRRCQKQLTFFGLTLQNCHYQAIPPHILLATGLVLPFVPWR

SEQ ID NO: 669 - protein, 229 aa, unidentified
MTTMRGPAAGDATLRRRIEPWDFQDFFDPRDLRRETCLLYEINWGGRHSVWRHTGKNTSNHVEVNFIEKFTSERYYSPSARCSIIWFLSWSPCWECSKAIIEFLHQHRNVTLFIYVARLFHHTDLRNRQGIRDLISSGVTIQIMTEPEYCYCWRYFVNYPPGSEVHWPRYPRQWMMLYVLELQCIILGLPSCVKILRRHQNQLTIFTLDLQNCHYQMIPPHILLATGLI

SEQ ID NO: 670 - protein, 228 aa, unidentified
MSSQTGPAVVDPTLRRRIEPQDFEAFFDPRELRKETCLLYEISWGGRHNTWRHTSRNTDKHVEINFIKKLTSERSFRPSARCSITWFLSWSPCWECSKAITEFLSQHPNVTLFIYVARLYHHMDPGNRQGLRNLVCRGVTVQIMTEQEYCYCWKNFVNYPPSNEVYWPRFPNVWMKLYILELLCIILGLPPCLRILRRNQCQATLFTLVFQGCHFQRIPPPIFWATGM

SEQ ID NO: 671 - protein, 228 aa, unidentified
MSSETGPAVVDPTLRRRIEPQEFEVFFDPRELRKETCLLYEISWGGRRSIWRHTSRNTDKHVEINFIEKLTSERSFRPSARCSITWFLSWSPCGECSKAITEFLSQHPNVTLFIYVARLYHHMDPGNRQGLRNLICRGVTVQIMTEQEYCYCWKNFVNYPPSNEVYWPRFPNVWMRLYMLELLCIILGLPPCLRILRRNQRQGTLFTLVFQRCHYQRIPPPIVWARGM

SEQ ID NO: 672 - protein, 236 aa, unidentified
MTSEKGPSTGDATLRRRIEPWEFEVFFDPGKLRKETCMFYEIKWGTSHKIWRNSSKNTTNHVEVNFIEKFTAERHFCPSISCSITWFLSWSPCWECSKAIREFLSQHPNMILVIYTARLFQHMDQQNRQGLRDLINSGVTVQIMTVSEYCYCWRNFVNYPPKEETHWPKYQPLLMMLYALELHCIILSLPPCLKISRRCQKQLTFFSLTLQNCHYQTIPPHILLSTGLIQPSVTWR

SEQ ID NO: 673 - protein, 236 aa, unidentified
MTSEKGPSTGDATLRRRIEPWEFEVFFNPGELRKETCMFYEIKWGTSQKIWRNSSKNTTNHVEVNFIEKFTAERHFCPSISCSITWFLSWSPCWECSKAIREFLSQHPNTTLVIYTARLFQHMDQQNRQGLRDLINSGVTVQIMTISEYCYCWRNFVNYSPKEETHWPKYQPLLMMLYALELHCIILSLPPCLKISRRYQKQLTFFNLILQNCHYQTIPPHILLSLGLIQPSVTWR

SEQ ID NO: 674 - protein, 223 aa, unidentified
MTSLQGPSAGDPTLSPRQLRRETCLLSEVRWGASPRAWRECCLNAARHAEASFLHRLTLGGRLQGPARCTITWFLSWSPCRECARATGQFLRQHPNVSLVVYVARLFWHVDEQNRQGLRDLVAAGARVQVMSDPEFCHCWRNFVNYPPGQEARWPRFPPVWTMLYTLELCCVLLNLPPCLKISRRCHNQLAFFQLNLQNCHYRAIPPAVLFAVGLIHPFVAWA

SEQ ID NO: 675 - protein, 228 aa, unidentified
MSSETGPAVVDPTLRRRIEPQEFEVFFDPRELRKETCLLYEISWGGRRSIWRHTSRNTDKHVEINFIEKLTSQRSFRPSARCSITWFLSWSPCGECSKAITEFLSQHPNVTLFIYVARLYHHMDPGNRQGLRNLICRGVTVQIMTEQEYCYCWKNFVNYPPSNEVYWPRFPNVWMRLYMLELLCIILGLPPCLRILRRNQRHDTLFTLVFQRCHYQRIPPPIIWARGM

SEQ ID NO: 676 - protein, 972 aa, synthetic construct
MTDSQNDTDEYWMGEALKLAQKAWDEGEVPVGAILVRKGEVIGHGWNRSIGSHDPSAHAEIMAIREAGVRIGNYRMLDTVLYVTLEPCAMCAGALVHGRISRLVFGAENPKTGACGSVMDIARHPALNHQLQVDGGVMAAPCARLLSDFFRWRRAQKKAARDNSSGNGTSGGSSGGSSGSETPGTSESATPESSGGSSGGSMERELVLGIAYGGKYTGLAVVDRRHNQVLYANRLKMRDDVAGILKDRRKQRGIRRTAQTKKKRLRELKNYLKSIGYNESTATFETVYSLAHKRGYDYADMPEEKTSEEIEAMDVEERKQWEKEKQEWEETKRNSRHRKEVVKDVHKAMIEGRATEEQIKRVERIFNKQYRPKRFNNRILTKCKVEDCGVNTPLRKNVRDLLIENIVRFFPIEQSEKDNLKDAVLDKNRREEVKSFFRKHKTDEHIRKQVYDIADNKLSGRTVFCKEHILEHTEHSKEERKVFRLAPSLKTKIENVLAVIKDEILPKFTVNKVVMESNNFDIAAKTQGKKRLAKEEYGKGPREGKETRKEALLRETDGRCIYCGKSIDISNAHDDHIFPRKAGGLNIFANLVACCAVCNENKKGRTPLESGISPKPEIIAFMKNDLKKKILEDARNINTVDFNKYMSHASIGWRYMRDRLRESAGNKKLPIERQSGIYTAYFRRWWGFKKERGNTLHHALDAVILASRKGYSDDGLVDMTLKPKYNKGGEFDPEKHLPEPIEFKMDKGSRGSALHDRNPLSYKKGIITRRFMVTEIECGKEDDVISETYREKLKEAFKRFDTKKGKCLTDKEAKEAGFCIKKNELVMSLKCSIKGTGPGQMIRINNNVFKTNVHNVGVDVYLDEKGKKKAYERKNPRLSKHFIEPPPQPNGRVSFTLKRRDMVTVEGEDAIYRIKKLGTSPTIEAVVGSDGKTRTVSATKLTKANSAELEEGADKRTADGSEFESPKKKRKV

SEQ ID NO: 677 - protein, 972 aa, synthetic construct
MSEVEFSHEYWMRHALTLAKRARDEREVPVGAVLVLNNRVIGEGWNRAIGLHDPTAHAEIMALRQGGLVMQNYRLIDATLYVTFEPCVMCAGAMIHSRIGRVVFGVRNAKTGAAGSLMDVLHHPGMNHRVEITEGILADECAALLCRFFRMPRRVFNAQKKAQSSTDGTSGGSSGGSSGSETPGTSESATPESSGGSSGGSMERELVLGIAYGGKYTGLAVVDRRHNQVLYANRLKMRDDVAGILKDRRKQRGIRRTAQTKKKRLRELKNYLKSIGYNESTATFETVYSLAHKRGYDYADMPEEKTSEEIEAMDVEERKQWEKEKQEWEETKRNSRHRKEVVKDVHKAMIEGRATEEQIKRVERIFNKQYRPKRFNNRILTKCKVEDCGVNTPLRKNVRDLLIENIVRFFPIEQSEKDNLKDAVLDKNRREEVKSFFRKHKTDEHIRKQVYDIADNKLSGRTVFCKEHILEHTEHSKEERKVFRLAPSLKTKIENVLAVIKDEILPKFTVNKVVMESNNFDIAAKTQGKKRLAKEEYGKGPREGKETRKEALLRETDGRCIYCGKSIDISNAHDDHIFPRKAGGLNIFANLVACCAVCNENKKGRTPLESGISPKPEIIAFMKNDLKKKILEDARNINTVDFNKYMSHASIGWRYMRDRLRESAGNKKLPIERQSGIYTAYFRRWWGFKKERGNTLHHALDAVILASRKGYSDDGLVDMTLKPKYNKGGEFDPEKHLPEPIEFKMDKGSRGSALHDRNPLSYKKGIITRRFMVTEIECGKEDDVISETYREKLKEAFKRFDTKKGKCLTDKEAKEAGFCIKKNELVMSLKCSIKGTGPGQMIRINNNVFKTNVHNVGVDVYLDEKGKKKAYERKNPRLSKHFIEPPPQPNGRVSFTLKRRDMVTVEGEDAIYRIKKLGTSPTIEAVVGSDGKTRTVSATKLTKANSAELEEGADKRTADGSEFESPKKKRKV

SEQ ID NO: 678 - protein, 1591 aa, synthetic construct
MTDSQNDTDEYWMGEALKLAQKAWDEGEVPVGAILVRKGEVIGHGWNRSIGSHDPSAHAEIMAIREAGVRIGNYRMLDTVLYVTLEPCAMCAGALVHGRISRLVFGAENPKTGACGSVMDIARHPALNHQLQVDGGVMAAPCARLLSDFFRWRRAQKKAARDNSSGNGTSGGSSGGSSGSETPGTSESATPESSGGSSGGSMDKKYSIGLAIGTNSVGWAVITDEYKVPSKKFKVLGNTDRHSIKKNLIGALLFDSGETAEATRLKRTARRRYTRRKNRICYLQEIFSNEMAKVDDSFFHRLEESFLVEEDKKHERHPIFGNIVDEVAYHEKYPTIYHLRKKLVDSTDKADLRLIYLALAHMIKFRGHFLIEGDLNPDNSDVDKLFIQLVQTYNQLFEENPINASGVDAKAILSARLSKSRRLENLIAQLPGEKKNGLFGNLIALSLGLTPNFKSNFDLAEDAKLQLSKDTYDDDLDNLLAQIGDQYADLFLAAKNLSDAILLSDILRVNTEITKAPLSASMIKRYDEHHQDLTLLKALVRQQLPEKYKEIFFDQSKNGYAGYIDGGASQEEFYKFIKPILEKMDGTEELLVKLNREDLLRKQRTFDNGSIPHQIHLGELHAILRRQEDFYPFLKDNREKIEKILTFRIPYYVGPLARGNSRFAWMTRKSEETITPWNFEEVVDKGASAQSFIERMTNFDKNLPNEKVLPKHSLLYEYFTVYNELTKVKYVTEGMRKPAFLSGEQKKAIVDLLFKTNRKVTVKQLKEDYFKKIECFDSVEISGVEDRFNASLGTYHDLLKIIKDKDFLDNEENEDILEDIVLTLTLFEDREMIEERLKTYAHLFDDKVMKQLKRRRYTGWGRLSRKLINGIRDKQSGKTILDFLKSDGFANRNFMQLIHDDSLTFKEDIQKAQVSGQGDSLHEHIANLAGSPAIKKGILQTVKVVDELVKVMGRHKPENIVIEMARENQTTQKGQKNSRERMKRIEEGIKELGSQILKEHPVENTQLQNEKLYLYYLQNGRDMYVDQELDINRLSDYDVDHIVPQSFLKDDSIDNKVLTRSDKNRGKSDNVPSEEVVKKMKNYWRQLLNAKLITQRKFDNLTKAERGGLSELDKAGFIKRQLVETRQITKHVAQILDSRMNTKYDENDKLIREVKVITLKSKLVSDFRKDFQFYKVREINNYHHAHDAYLNAVVGTALIKKYPKLESEFVYGDYKVYDVRKMIAKSEQEIGKATAKYFFYSNIMNFFKTEITLANGEIRKRPLIETNGETGEIVWDKGRDFATVRKVLSMPQVNIVKKTEVQTGGFSKESILPKRNSDKLIARKKDWDPKKYGGFDSPTVAYSVLVVAKVEKGKSKKLKSVKELLGITIMERSSFEKNPIDFLEAKGYKEVKKDLIIKLPKYSLFELENGRKRMLASAGELQKGNELALPSKYVNFLYLASHYEKLKGSPEDNEQKQLFVEQHKHYLDEIIEQISEFSKRVILADANLDKVLSAYNKHRDKPIREQAENIIHLFTLTNLGAPAAFKYFDTTIDRKRYTSTKEVLDATLIHQSITGLYETRIDLSQLGGDEGADKRTADGSEFESPKKKRKV

SEQ ID NO: 679 - DNA, 123 bp, synthetic construct; identical to SEQ ID NO: 489
  source 1..123: mol_type = other DNA

SEQ ID NO: 680 - DNA, 83 bp, synthetic construct
  source 1..83: mol_type = other DNA
gttttagagctagaaatagcaagttaaaataaggctagtccgttatcaacttgaaaaagtggcaccgagtcggtgcttttttt

SEQ ID NO: 681 - skipped

SEQ ID NO: 682 - DNA, 20 bp, synthetic construct
  source 1..20: mol_type = other DNA
gggaaagacccagcatccgt

SEQ ID NO: 683 - DNA, 20 bp, synthetic construct
  source 1..20: mol_type = other DNA
gctcccatcacatcaaccgg

SEQ ID NO: 684 - DNA, 20 bp, synthetic construct
  source 1..20: mol_type = other DNA
ggtgagtgagtgtgtgcgtg

SEQ ID NO: 685 - DNA, 20 bp, synthetic construct
  source 1..20: mol_type = other DNA
ggcttcaggttctaaatgag

SEQ ID NO: 686 - DNA, 20 bp, synthetic construct
  source 1..20: mol_type = other DNA
gcagagagtcgccgtctcca

SEQ ID NO: 687 - DNA, 20 bp, synthetic construct
  source 1..20: mol_type = other DNA
gatgagaaggagaagttctt

SEQ ID NO: 688 - DNA, 20 bp, synthetic construct
  source 1..20: mol_type = other DNA
agcaaacgcgttcagggcct

SEQ ID NO: 689 - DNA, 20 bp, synthetic construct
  source 1..20: mol_type = other DNA
tgagtccgagcagaagaaga

SEQ ID NO: 690 - DNA, 36 bp, synthetic construct
  source 1..36: mol_type = other DNA
gctcttccgatctnnnnnctggctgagctaactgtg

SEQ ID NO: 691 - DNA, 39 bp, synthetic construct
  source 1..39: mol_type = other DNA
gctcttccgatctnnnnnaactgtgcgtatgacatcatc

SEQ ID NO: 692 - DNA, 36 bp, synthetic construct
  source 1..36: mol_type = other DNA
gctcttccgatctnnnnncatgcgccggcacgcccc

SEQ ID NO: 693 - DNA, 36 bp, synthetic construct
  source 1..36: mol_type = other DNA
gctcttccgatctnnnnngggtctctagaccagcgt

SEQ ID NO: 694 - DNA, 38 bp, synthetic construct
  source 1..38: mol_type = other DNA
gctcttccgatctnnnnngctcccatcacatcaaccgg

SEQ ID NO: 695 - DNA, 36 bp, synthetic construct
  source 1..36: mol_type = other DNA
gctcttccgatctnnnnnccaccctagtcattggag

SEQ ID NO: 696 - DNA, 36 bp, synthetic construct
  source 1..36: mol_type = other DNA
gctcttccgatctnnnnncacagggaagctgggtga

SEQ ID NO: 697 - DNA, 39 bp, synthetic construct
  source 1..39: mol_type = other DNA
gctcttccgatctnnnnncacagatctattggaatcctg

SEQ ID NO: 698 - DNA, 36 bp, synthetic construct
  source 1..36: mol_type = other DNA
gctcttccgatctnnnnnggtctttagcccagtctc

SEQ ID NO: 699 - DNA, 42 bp, synthetic construct
  source 1..42: mol_type = other DNA
gctcttccgatctnnnnnatttcatggctgagtgaattcaaa

SEQ ID NO: 700 - DNA, 36 bp, synthetic construct
  source 1..36: mol_type = other DNA
gctcttccgatctnnnnnagcgatccaggtgctgca

SEQ ID NO: 701 - DNA, 39 bp, synthetic construct
  source 1..39: mol_type = other DNA
gctcttccgatctnnnnngacatgcatttcgaccaatag

SEQ ID NO: 702 - DNA, 41 bp, synthetic construct
  source 1..41: mol_type = other DNA
gctcttccgatctnnnnnaagacatgaaaatgtgcttgatg

SEQ ID NO: 703 - DNA, 36 bp, synthetic construct
  source 1..36: mol_type = other DNA
gctcttccgatctnnnnnctgaggagggcccccctg

SEQ ID NO: 704 - DNA, 36 bp, synthetic construct
  source 1..36: mol_type = other DNA
gctcttccgatctnnnnntccagctccagccccaga

SEQ ID NO: 705 - DNA, 44 bp, synthetic construct
  source 1..44: mol_type = other DNA
gctcttccgatctnnnnnaacaaaagagaggagttaatgaatta

SEQ ID NO: 706 - DNA, 37 bp, synthetic construct
  source 1..37: mol_type = other DNA
gctcttccgatctnnnnngtgaaggtgtggttccaga

SEQ ID NO: 707 - DNA, 37 bp, synthetic construct
  source 1..37: mol_type = other DNA
gctcttccgatctnnnnnatcgatgtcctccccattg

SEQ ID NO: 708 - DNA, 476 bp, synthetic construct
  source 1..476: mol_type = other DNA
ccgacctctctccccagggggatccaccggagcttaagacgggactaggtcaggccgggtcaggttctggtttggatcaggctaagcctttgtctcaagaagaatccaccctcattgaaagagcaacggctacaatcaacagcatccccatctctgaagactacagcgtcgccagcgcagctctctctagcgacggccgcatcttcactggtgtcaatgtatatcattttactgggggaccttgtgcagaactcgtggtgctgggcactgctgctgctgcggcagctggcaacctgacttgtatcgtcgcgatcggaaatgagaacaggggcatcttgagcccctgcggacggtgccgacaggtgcttctcgatctgcatcctgggatcaaagccatagtgaaggacagtgatggacagccgacggcagttgggattcgtgaattgctgccctctggttatgtgtgggagggctaa

SEQ ID NO: 709 - DNA, 22 bp, synthetic construct
  source 1..22: mol_type = other DNA
gacgggactaggtcaggccggg

SEQ ID NO: 710 - DNA, 22 bp, synthetic construct
  source 1..22: mol_type = other DNA
cttaagacgggactaggtcagg

SEQ ID NO: 711 - DNA, 22 bp, synthetic construct
  source 1..22: mol_type = other DNA
cggagcttaagacgggactagg

SEQ ID NO: 712 - DNA, 22 bp, synthetic construct
  source 1..22: mol_type = other DNA
tccaccggagcttaagacggga

SEQ ID NO: 713 - DNA, 22 bp, synthetic construct
  source 1..22: mol_type = other DNA
ggggatccaccggagcttaaga

SEQ ID NO: 714 - DNA, 22 bp, synthetic construct
  source 1..22: mol_type = other DNA
cgggactaggtcaggccgggtc

SEQ ID NO: 715 - DNA, 22 bp, synthetic construct
  source 1..22: mol_type = other DNA
taagacgggactaggtcaggcc

SEQ ID NO: 716 - DNA, 22 bp, synthetic construct
  source 1..22: mol_type = other DNA
ttaagacgggactaggtcaggc

SEQ ID NO: 717 - DNA, 22 bp, synthetic construct
  source 1..22: mol_type = other DNA
gagcttaagacgggactaggtc

SEQ ID NO: 718 - DNA, 22 bp, synthetic construct
  source 1..22: mol_type = other DNA
caccggagcttaagacgggact

SEQ ID NO: 719 - DNA, 22 bp, synthetic construct
  source 1..22: mol_type = other DNA
gggatccaccggagcttaagac

SEQ ID NO: 720 - DNA, 3348 bp, synthetic construct
  source 1..3348: mol_type = other DNA
ctgcttgtgtgttggaggtcgctgagtagtgcgcgagcaaaatttaagctacaacaaggcaaggcttgaccgacaattgcatgaagaatctgcttagggttaggcgttttgcgctgcttcgcgatgtacgggccagatatacgcgttgacattgattattgactagttattaatagtaatcaattacggggtcattagttcatagcccatatatggagttccgcgttacataacttacggtaaatggcccgcctggctgaccgcccaacgacccccgcccattgacgtcaataatgacgtatgttcccatagtaacgccaatagggactttccattgacgtcaatgggtggagtatttacggtaaactgcccacttggcagtacatcaagtgtatcatatgccaagtacgccccctattgacgtcaatgacggtaaatggcccgcctggcattatgcccagtacatgaccttatgggactttcctacttggcagtacatctacgtattagtcatcgctattaccatggtgatgcggttttggcagtacatcaatgggcgtggatagcggtttgactcacggggatttccaagtctccaccccattgacgtcaatgggagtttgttttggcaccaaaatcaacgggactttccaaaatgtcgtaacaactccgccccattgacgcaaatgggcggtaggcgtgtacggtgggaggtctatataagcagagctggtttagtgaaccgtcagatccgctagagatccgcggccgcggatcccatcatcaccatcaccattgagtttaaacccgctgatcagcctcgactgtgccttctagttgccagccatctgttgtttgcccctcccccgtgccttccttgaccctggaaggtgccactcccactgtcctttcctaataaaatgaggaaattgcatcgcattgtctgagtaggtgtcattctattctggggggtggggtggggcaggacagcaagggggaggattgggaagacaatagcaggcatgctggggatgcggtgggctctatggcttctgaggcggaaagaaccagctggggctcgataccgtcgacctctagctagagcttggcgtaatcatggtcatagctgtttcctgtgtgaaattgttatccgctcacaattccacacaacatacgagccggaagcataaagtgtaaagcctagggtgcctaatgagtgagctaactcacattaattgcgttgcgctcactgcccgctttccagtcgggaaacctgtcgtgccagctgcattaatgaatcggccaacgcgcggggagaggcggtttgcgtattgggcgctcttccgcttcctcgctcactgactcgctgcgctcggtcgttcggctgcggcgagcggtatcagctcactcaaaggcggtaatacggttatccacagaatcaggggataacgcaggaaagaacatgtgagcaaaaggccagcaaaaggccaggaaccgtaaaaaggccgcgttgctggcgtttttccataggctccgcccccctgacgagcatcacaaaaatcgacgctcaagtcagaggtggcgaaacccgacaggactataaagataccaggcgtttccccctggaagctccctcgtgcgctctcctgttccgaccctgccgcttaccggatacctgtccgcctttctcccttcgggaagcgtggcgctttctcatagctcacgctgtaggtatctcagttcggtgtaggtcgttcgctccaagctgggctgtgtgcacgaaccccccgttcagcccgaccgctgcgccttatccggtaactatcgtcttgagtccaacccggtaagacacgacttatcgccactggcagcagccactggtaacaggattagcagagcgaggtatgtaggcggtgctacagagttcttgaagtggtggcctaactacggctacactagaagaacagtatttggtatctgcgctctgctgaagccagttaccttcggaaaaagagttggtagctcttgatccggcaaacaaaccaccgctggtagcggtggtttttttgtttgcaagcagcagattacgcgcagaaaaaaaggatctcaagaagatcctttgatcttttctacggggtctgacgctcagtggaacgaaaactcacgttaagggattttggtcatgagattatcaaaaaggatcttcacctagatccttttaaattaaaaatgaagttttaaatcaatctaaagtatatatgagtaaacttggtctgacagttaccaatgcttaatcagtgaggcacctatctcagcgatctgtctatttcgttcatccatagttgcctgactccccgtcgtgtagataactacgatacgggagggcttaccatctggccccagtgctgcaatgataccgcgagacccacgctcaccggctccagatttatcagcaataaaccagccagccggaagggccgagcgcagaagtggtcctgcaactttatccgcctccatccagtctattaattgttgccgggaagctagagtaagtagttcgccagttaatagtttgcgcaacgttgttgccattgctacaggcatcgtggtgtcacgctcgtcgtttggtatggcttcattcagctccggttcccaacgatcaaggcgagttacatgatcccccatgttgtgcaaaaaagcggttagctccttcggtcctccgatcgttgtcagaagtaagttggccgcagtgttatcactcatggttatggcagcactgcataattctcttactgtcatgccatccgtaagatgcttttctgtgactggtgagtactcaaccaagtcattctgagaatagtgtatgcggcgaccgagttgctcttgcccggcgtcaatacgggataataccgcgccacatagcagaactttaaaagtgctcatcattggaaaacgttcttcggggcgaaaactctcaaggatcttaccgctgttgagatccagttcgatgtaacccactcgtgcacccaactgatcttcagcatcttttactttcaccagcgtttctgggtgagcaaaaacaggaaggcaaaatgccgcaaaaaagggaataagggcgacacggaaatgttgaatactcatactcttcctttttcaatattattgaagcatttatcagggttattgtctcatgagcggatacatatttgaatgtatttagaaaaataaacaaataggggttccgcgcacatttccccgaaaagtgccacctgacgtcgaccctagggtcgactctcagtacaatctgctctgatgccgaagcttcatagttaagccagtatctgctcc

SEQ ID NO: 721 - DNA, 6263 bp, synthetic construct
  source 1..6263: mol_type = other DNA
ctgcttgtgtgttggaggtcgctgagtagtgcgcgagcaaaatttaagctacaacaaggcaaggcttgaccgacaattgcatgaagaatctgcttagggttaggcgttttgcgctgcttcgcgatgtacgggccagatatacgcgttgacattgattattgactagttattaatagtaatcaattacggggtcattagttcatagcccatatatggagttccgcgttacataacttacggtaaatggcccgcctggctgaccgcccaacgacccccgcccattgacgtcaataatgacgtatgttcccatagtaacgccaatagggactttccattgacgtcaatgggtggagtatttacggtaaactgcccacttggcagtacatcaagtgtatcatatgccaagtacgccccctattgacgtcaatgacggtaaatggcccgcctggcattatgcccagtacatgaccttatgggactttcctacttggcagtacatctacgtattagtcatcgctattaccatggtgatgcggttttggcagtacatcaatgggcgtggatagcggtttgactcacggggatttccaagtctccaccccattgacgtcaatgggagtttgttttggcaccaaaatcaacgggactttccaaaatgtcgtaacaactccgccccattgacgcaaatgggcggtaggcgtgtacggtgggaggtctatataagcagagctggtttagtgaaccgtcagatccgctagagatccgcggccgcgatgaccgactctcaaaatgacactgatgaatactggatgggtgaggctcttaaactggcgcagaaagcctgggacgaaggtgaagtgcctgttggcgccatcctggtccggaaaggggaagtgattgggcacgggtggaatcgaagcattgggtcacacgatccatccgctcatgcagaaattatggcgatcagagaggccggagttcgaatcggaaattatagaatgcttgataccgtgctgtacgtgaccttagagccctgcgcaatgtgcgcaggtgccctggttcatggaagaattagccggctggtgtttggagcagagaaccccaagactggggcttgtggatctgttatggacattgcaaggcatccagccctgaaccatcaactccaagttgatggcggagtcatggctgccccctgcgcccgcttattgtccgacttcttccgctggcgccgtgcgcaaaagaaagctgccagagataactctagcggaaatggtacctcaggcgggtcttccggcggcagtagtgggagcgaaacaccgggcacaagtgagagcgcaacaccggaatcatctggcggttcaagcggcggatccatggaacgcgaattggtcttgggaattgcgtatggcggaaagtacactggtctggccgtcgtcgataggagacataaccaagtgctctacgcaaatagactgaagatgagggatgatgtcgccggcattcttaaagaccgccggaagcaaaggggcatcaggcgcaccgcccaaacaaagaagaagcgtttgcgagaacttaagaattatctcaaaagtataggttacaatgagtcaaccgctacttttgaaacggtttactcactggctcacaagaggggctatgactatgctgatatgcccgaggaaaagactagtgaagaaattgaagcaatggacgtggaagagcggaaacaatgggaaaaggagaaacaagagtgggaagagactaaacgaaactctagacatcgtaaagaagtcgtgaaggatgtccacaaagctatgattgaaggcagggctactgaggaacaaattaaaagagtggaacggatatttaataaacaatacagacccaagcgattcaataatcgcatcctgacaaaatgcaaggtcgaagactgcggagtcaacacccctttgaggaagaatgttagggatctcctgatagaaaatattgtgaggttcttcccaatagaacaatctgaaaaggataacttgaaggacgccgtgttggataagaatagaagggaagaagtcaagtccttctttaggaaacataaaaccgatgagcatatacgcaaacaggtgtatgatatagccgataacaagctctctggcaggacagtcttttgcaaggagcacattctggaacacacagaacattctaaggaagagaggaaagtattcagactcgctccgagtcttaagaccaaaatagagaatgtccttgccgtaattaaagatgaaatcctgcctaagttcaccgtcaataaagtcgtgatggagtctaacaatttcgacatcgctgccaaaactcaaggcaagaaacggctcgccaaagaagagtatggtaagggaccacgtgaaggcaaagaaaccaggaaagaagctctcctgcgggagactgatggcagatgcatatattgtgggaagtcaatagatatctccaatgctcatgacgaccatatctttcctcgaaaggccggcggactgaacatcttcgcaaatcttgtagcatgctgtgccgtgtgtaatgagaataagaaagggcggacacctctggaatcaggtattagcccaaagccagagatcatcgctttcatgaagaatgatctcaagaagaagatccttgaagacgcccgaaacataaacacggtggatttcaataagtacatgtcacatgccagcattggctggagatatatgagagaccgacttagggaatctgccgggaataagaagctcccgattgagaggcaaagcgggatctatacggcatactttcggagatggtggggattcaagaaggagcggggcaatacactccaccatgccttggatgctgttatcctggcgtcccggaaaggatatagcgatgacgggttggttgacatgacattgaaacctaaatacaacaaaggtggagagttcgatccagaaaagcacctgccagaacctattgagttcaaaatggacaaaggttccaggggatctgcacttcatgatagaaaccccttgtcctataagaagggaattattactcgtaggttcatggtcactgaaatcgagtgcgggaaagaggatgacgtgatctcagaaacttacagagagaaactcaaagaggcattcaagcgctttgataccaagaaaggaaaatgtctgaccgacaaggaagccaaagaggccggattctgcatcaagaagaatgagctggtgatgagtcttaaatgttccatcaaaggaacaggccctgggcaaatgattcgcattaacaacaatgtattcaaaactaacgttcataatgttggggttgatgtttatctcgacgagaaaggcaagaagaaagcctacgaaagaaagaacccgcggttgagcaaacatttcattgagccaccaccacagcctaatggaagggttagcttcactctcaaacggagagacatggtaactgtcgagggagaagatgcaatttataggatcaagaagctcggtacatctcccactatagaggccgtcgtaggatcagacggaaagacccggactgtgtcagcaacaaaacttaccaaggctaacagtgctgagctcgaggagggagctgataagcgcaccgccgatggttccgagttcgaaagccccaagaagaagaggaaagtctaaccatcatcaccatcaccattgagtttaaacccgctgatcagcctcgactgtgccttctagttgccagccatctgttgtttgcccctcccccgtgccttccttgaccctggaaggtgccactcccactgtcctttcctaataaaatgaggaaattgcatcgcattgtctgagtaggtgtcattctattctggggggtggggtggggcaggacagcaagggggaggattgggaagacaatagcaggcatgctggggatgcggtgggctctatggcttctgaggcggaaagaaccagctggggctcgataccgtcgacctctagctagagcttggcgtaatcatggtcatagctgtttcctgtgtgaaattgttatccgctcacaattccacacaacatacgagccggaagcataaagtgtaaagcctagggtgcctaatgagtgagctaactcacattaattgcgttgcgctcactgcccgctttccagtcgggaaacctgtcgtgccagctgcattaatgaatcggccaacgcgcggggagaggcggtttgcgtattgggcgctcttccgcttcctcgctcactgactcgctgcgctcggtcgttcggctgcggcgagcggtatcagctcactcaaaggcggtaatacggttatccacagaatcaggggataacgcaggaaagaacatgtgagcaaaaggccagcaaaaggccaggaaccgtaaaaaggccgcgttgctggcgtttttccataggctccgcccccctgacgagcatcacaaaaatcgacgctcaagtcagaggtggcgaaacccgacaggactataaagataccaggcgtttccccctggaagctccctcgtgcgctctcctgttccgaccctgccgcttaccggatacctgtccgcctttctcccttcgggaagcgtggcgctttctcatagctcacgctgtaggtatctcagttcggtgtaggtcgttcgctccaagctgggctgtgtgcacgaaccccccgttcagcccgaccgctgcgccttatccggtaactatcgtcttgagtccaacccggtaagacacgacttatcgccactggcagcagccactggtaacaggattagcagagcgaggtatgtaggcggtgctacagagttcttgaagtggtggcctaactacggctacactagaagaacagtatttggtatctgcgctctgctgaagccagttaccttcggaaaaagagttggtagctcttgatccggcaaacaaaccaccgctggtagcggtggtttttttgtttgcaagcagcagattacgcgcagaaaaaaaggatctcaagaagatcctttgatcttttctacggggtctgacgctcagtggaacgaaaactcacgttaagggattttggtcatgagattatcaaaaaggatcttcacctagatccttttaaattaaaaatgaagttttaaatcaatctaaagtatatatgagtaaacttggtctgacagttaccaatgcttaatcagtgaggcacctatctcagcgatctgtctatttcgttcatccatagttgcctgactccccgtcgtgtagataactacgatacgggagggcttaccatctggccccagtgctgcaatgataccgcgagacccacgctcaccggctccagatttatcagcaataaaccagccagccggaagggccgagcgcagaagtggtcctgcaactttatccgcctccatccagtctattaattgttgccgggaagctagagtaagtagttcgccagttaatagtttgcgcaacgttgttgccattgctacaggcatcgtggtgtcacgctcgtcgtttggtatggcttcattcagctccggttcccaacgatcaaggcgagttacatgatcccccatgttgtgcaaaaaagcggttagctccttcggtcctccgatcgttgtcagaagtaagttggccgcagtgttatcactcatggttatggcagcactgcataattctcttactgtcatgccatccgtaagatgcttttctgtgactggtgagtactcaaccaagtcattctgagaatagtgtatgcggcgaccgagttgctcttgcccggcgtcaatacgggataataccgcgccacatagcagaactttaaaagtgctcatcattggaaaacgttcttcggggcgaaaactctcaaggatcttaccgctgttgagatccagttcgatgtaacccactcgtgcacccaactgatcttcagcatcttttactttcaccagcgtttctgggtgagcaaaaacaggaaggcaaaatgccgcaaaaaagggaataagggcgacacggaaatgttgaatactcatactcttcctttttcaatattattgaagcatttatcagggttattgtctcatgagcggatacatatttgaatgtatttagaaaaataaacaaataggggttccgcgcacatttccccgaaaagtgccacctgacgtcgaccctagggtcgactctcagtacaatctgctctgatgccgaagcttcatagttaagccagtatctgctcc

SEQ ID NO: 722 - DNA, 6263 bp, synthetic construct
  source 1..6263: mol_type = other DNA
ctgcttgtgtgttggaggtcgctgagtagtgcgcgagcaaaatttaagctacaacaaggcaaggcttgaccgacaattgcatgaagaatctgcttagggttaggcgttttgcgctgcttcgcgatgtacgggccagatatacgcgttgacattgattattgactagttattaatagtaatcaattacggggtcattagttcatagcccatatatggagttccgcgttacataacttacggtaaatggcccgcctggctgaccgcccaacgacccccgcccattgacgtcaataatgacgtatgttcccatagtaacgccaatagggactttccattgacgtcaatgggtggagtatttacggtaaactgcccacttggcagtacatcaagtgtatcatatgccaagtacgccccctattgacgtcaatgacggtaaatggcccgcctggcattatgcccagtacatgaccttatgggactttcctacttggcagtacatctacgtattagtcatcgctattaccatggtgatgcggttttggcagtacatcaatgggcgtggatagcggtttgactcacggggatttccaagtctccaccccattgacgtcaatgggagtttgttttggcaccaaaatcaacgggactttccaaaatgtcgtaacaactccgccccattgacgcaaatgggcggtaggcgtgtacggtgggaggtctatataagcagagctggtttagtgaaccgtcagatccgctagagatccgcggccgcgatgagcgaagtcgaattttcccatgagtactggatgcggcatgcacttacattggctaaaagagctagggacgaacgcgaagtaccagtaggcgcagtactggtcttaaacaatagggtgataggggaaggatggaaccgggcaatcgggttacacgaccctacagcgcatgcagaaattatggctttgcggcaaggtggccttgtcatgcagaattataggctcatagatgcgacgctgtatgtgacattcgagccttgtgtaatgtgtgctggcgccatgattcattcaaggattggacgcgtagtgttcggagtgcgaaacgcaaagacaggagccgctgggagtttaatggacgtattacatcatcctggcatgaatcacagggtggaaatcaccgaagggattctcgccgatgagtgtgcggctcttctttgtaggttctttcgtatgcctcggcgcgtgttcaacgcgcagaagaaggcacaaagcagtacagatggtacctcaggcgggtcttccggcggcagtagtgggagcgaaacaccgggcacaagtgagagcgcaacaccggaatcatctggcggttcaagcggcggatccatggaacgcgaattggtcttgggaattgcgtatggcggaaagtacactggtctggccgtcgtcgataggagacataaccaagtgctctacgcaaatagactgaagatgagggatgatgtcgccggcattcttaaagaccgccggaagcaaaggggcatcaggcgcaccgcccaaacaaagaagaagcgtttgcgagaacttaagaattatctcaaaagtataggttacaatgagtcaaccgctacttttgaaacggtttactcactggctcacaagaggggctatgactatgctgatatgcccgaggaaaagactagtgaagaaattgaagcaatggacgtggaagagcggaaacaatgggaaaaggagaaacaagagtgggaagagactaaacgaaactctagacatcgtaaagaagtcgtgaaggatgtccacaaagctatgattgaaggcagggctactgaggaacaaattaaaagagtggaacggatatttaataaacaatacagacccaagcgattcaataatcgcatcctgacaaaatgcaaggtcgaagactgcggagtcaacacccctttgaggaagaatgttagggatctcctgatagaaaatattgtgaggttcttcccaatagaacaatctgaaaaggataacttgaaggacgccgtgttggataagaatagaagggaagaagtcaagtccttctttaggaaacataaaaccgatgagcatatacgcaaacaggtgtatgatatagccgataacaagctctctggcaggacagtcttttgcaaggagcacattctggaacacacagaacattctaaggaagagaggaaagtattcagactcgctccgagtcttaagaccaaaatagagaatgtccttgccgtaattaaagatgaaatcctgcctaagttcaccgtcaataaagtcgtgatggagtctaacaatttcgacatcgctgccaaaactcaaggcaagaaacggctcgccaaagaagagtatggtaagggaccacgtgaaggcaaagaaaccaggaaagaagctctcctgcgggagactgatggcagatgcatatattgtgggaagtcaatagatatctccaatgctcatgacgaccatatctttcctcgaaaggccggcggactgaacatcttcgcaaatcttgtagcatgctgtgccgtgtgtaatgagaataagaaagggcggacacctctggaatcaggtattagcccaaagccagagatcatcgctttcatgaagaatgatctcaagaagaagatccttgaagacgcccgaaacataaacacggtggatttcaataagtacatgtcacatgccagcattggctggagatatatgagagaccgacttagggaatctgccgggaataagaagctcccgattgagaggcaaagcgggatctatacggcatactttcggagatggtggggattcaagaaggagcggggcaatacactccaccatgccttggatgctgttatcctggcgtcccggaaaggatatagcgatgacgggttggttgacatgacattgaaacctaaatacaacaaaggtggagagttcgatccagaaaagcacctgccagaacctattgagttcaaaatggacaaaggttccaggggatctgcacttcatgatagaaaccccttgtcctataagaagggaattattactcgtaggttcatggtcactgaaatcgagtgcgggaaagaggatgacgtgatctcagaaacttacagagagaaactcaaagaggcattcaagcgctttgataccaagaaaggaaaatgtctgaccgacaaggaagccaaagaggccggattctgcatcaagaagaatgagctggtgatgagtcttaaatgttccatcaaaggaacaggccctgggcaaatgattcgcattaacaacaatgtattcaaaactaacgttcataatgttggggttgatgtttatctcgacgagaaaggcaagaagaaagcctacgaaagaaagaacccgcggttgagcaaacatttcattgagccaccaccacagcctaatggaagggttagcttcactctcaaacggagagacatggtaactgtcgagggagaagatgcaatttataggatcaagaagctcggtacatctcccactatagaggccgtcgtaggatcagacggaaagacccggactgtgtcagcaacaaaacttaccaaggctaacagtgctgagctcgaggagggagctgataagcgcaccgccgatggttccgagttcgaaagccccaagaagaagaggaaagtctaaccatcatcaccatcaccattgagtttaaacccgctgatcagcctcgactgtgccttctagttgccagccatctgttgtttgcccctcccccgtgccttccttgaccctggaaggtgccactcccactgtcctttcctaataaaatgaggaaattgcatcgcattgtctgagtaggtgtcattctattctggggggtggggtggggcaggacagcaagggggaggattgggaagacaatagcaggcatgctggggatgcggtgggctctatggcttctgaggcggaaagaaccagctggggctcgataccgtcgacctctagctagagcttggcgtaatcatggtcatagctgtttcctgtgtgaaattgttatccgctcacaattccacacaacatacgagccggaagcataaagtgtaaagcctagggtgcctaatgagtgagctaactcacattaattgcgttgcgctcactgcccgctttccagtcgggaaacctgtcgtgccagctgcattaatgaatcggccaacgcgcggggagaggcggtttgcgtattgggcgctcttccgcttcctcgctcactgactcgctgcgctcggtcgttcggctgcggcgagcggtatcagctcactcaaaggcggtaatacggttatccacagaatcaggggataacgcaggaaagaacatgtgagcaaaaggccagcaaaaggccaggaaccgtaaaaaggccgcgttgctggcgtttttccataggctccgcccccctgacgagcatcacaaaaatcgacgctcaagtcagaggtggcgaaacccgacaggactataaagataccaggcgtttccccctggaagctccctcgtgcgctctcctgttccgaccctgccgcttaccggatacctgtccgcctttctcccttcgggaagcgtggcgctttctcatagctcacgctgtaggtatctcagttcggtgtaggtcgttcgctccaagctgggctgtgtgcacgaaccccccgttcagcccgaccgctgcgccttatccggtaactatcgtcttgagtccaacccggtaagacacgacttatcgccactggcagcagccactggtaacaggattagcagagcgaggtatgtaggcggtgctacagagttcttgaagtggtggcctaactacggctacactagaagaacagtatttggtatctgcgctctgctgaagccagttaccttcggaaaaagagttggtagctcttgatccggcaaacaaaccaccgctggtagcggtggtttttttgtttgcaagcagcagattacgcgcagaaaaaaaggatctcaagaagatcctttgatcttttctacggggtctgacgctcagtggaacgaaaactcacgttaagggattttggtcatgagattatcaaaaaggatcttcacctagatccttttaaattaaaaatgaagttttaaatcaatctaaagtatatatgagtaaacttggtctgacagttaccaatgcttaatcagtgaggcacctatctcagcgatctgtctatttcgttcatccatagttgcctgactccccgtcgtgtagataactacgatacgggagggcttaccatctggccccagtgctgcaatgataccgcgagacccacgctcaccggctccagatttatcagcaataaaccagccagccggaagggccgagcgcagaagtggtcctgcaactttatccgcctccatccagtctattaattgttgccgggaagctagagtaagtagttcgccagttaatagtttgcgcaacgttgttgccattgctacaggcatcgtggtgtcacgctcgtcgtttggtatggcttcattcagctccggttcccaacgatcaaggcgagttacatgatcccccatgttgtgcaaaaaagcggttagctccttcggtcctccgatcgttgtcagaagtaagttggccgcagtgttatcactcatggttatggcagcactgcataattctcttactgtcatgccatccgtaagatgcttttctgtgactggtgagtactcaaccaagtcattctgagaatagtgtatgcggcgaccgagttgctcttgcccggcgtcaatacgggataataccgcgccacatagcagaactttaaaagtgctcatcattggaaaacgttcttcggggcgaaaactctcaaggatcttaccgctgttgagatccagttcgatgtaacccactcgtgcacccaactgatcttcagcatcttttactttcaccagcgtttctgggtgagcaaaaacaggaaggcaaaatgccgcaaaaaagggaataagggcgacacggaaatgttgaatactcatactcttcctttttcaatattattgaagcatttatcagggttattgtctcatgagcggatacatatttgaatgtatttagaaaaataaacaaataggggttccgcgcacatttccccgaaaagtgccacctgacgtcgaccctagggtcgactctcagtacaatctgctctgatgccgaagcttcatagttaagccagtatctgctcc

SEQ ID NO: 723 - DNA, 8120 bp, synthetic construct
  source 1..8120: mol_type = other DNA
ctgcttgtgtgttggaggtcgctgagtagtgcgcgagcaaaatttaagctacaacaaggcaaggcttgaccgacaattgcatgaagaatctgcttagggttaggcgttttgcgctgcttcgcgatgtacgggccagatatacgcgttgacattgattattgactagttattaatagtaatcaattacggggtcattagttcatagcccatatatggagttccgcgttacataacttacggtaaatggcccgcctggctgaccgcccaacgacccccgcccattgacgtcaataatgacgtatgttcccatagtaacgccaatagggactttccattgacgtcaatgggtggagtatttacggtaaactgcccacttggcagtacatcaagtgtatcatatgccaagtacgccccctattgacgtcaatgacggtaaatggcccgcctggcattatgcccagtacatgaccttatgggactttcctacttggcagtacatctacgtattagtcatcgctattaccatggtgatgcggttttggcagtacatcaatgggcgtggatagcggtttgactcacggggatttccaagtctccaccccattgacgtcaatgggagtttgttttggcaccaaaatcaacgggactttccaaaatgtcgtaacaactccgccccattgacgcaaatgggcggtaggcgtgtacggtgggaggtctatataagcagagctggtttagtgaaccgtcagatccgctagagatccgcggccgcgatgaccgactctcaaaatgacactgatgaatactggatgggtgaggctcttaaactggcgcagaaagcctgggacgaaggtgaagtgcctgttggcgccatcctggtccggaaaggggaagtgattgggcacgggtggaatcgaagcattgggtcacacgatccatccgctcatgcagaaattatggcgatcagagaggccggagttcgaatcggaaattatagaatgcttgataccgtgctgtacgtgaccttagagccctgcgcaatgtgcgcaggtgccctggttcatggaagaattagccggctggtgtttggagcagagaaccccaagactggggcttgtggatctgttatggacattgcaaggcatccagccctgaaccatcaactccaagttgatggcggagtcatggctgccccctgcgcccgcttattgtccgacttcttccgctggcgccgtgcgcaaaagaaagctgccagagataactctagcggaaatggtacctcaggcgggtcttccggcggcagtagtgggagcgaaacaccgggcacaagtgagagcgcaacaccggaatcatctggcggttcaagcggcggatccatggataaaaagtattctattggtttagccatcggcactaattccgttggatgggctgtcataaccgatgaatacaaagtaccttcaaagaaatttaaggtgttggggaacacagaccgtcattcgattaaaaagaatcttatcggtgccctcctattcgatagtggcgaaacggcagaggcgactcgcctgaaacgaaccgctcggagaaggtatacacgtcgcaagaaccgaatatgttacttacaagaaatttttagcaatgagatggccaaagttgacgattctttctttcaccgtttggaagagtccttccttgtcgaagaggacaagaaacatgaacggcaccccatctttggaaacatagtagatgaggtggcatatcatgaaaagtacccaacgatttatcacctcagaaaaaagctagttgactcaactgataaagcggacctgaggttaatctacttggctcttgcccatatgataaagttccgtgggcactttctcattgagggtgatctaaatccggacaactcggatgtcgacaaactgttcatccagttagtacaaacctataatcagttgtttgaagagaaccctataaatgcaagtggcgtggatgcgaaggctattcttagcgcccgcctctctaaatcccgacggctagaaaacctgatcgcacaattacccggagagaagaaaaatgggttgttcggtaaccttatagcgctctcactaggcctgacaccaaattttaagtcgaacttcgacttagctgaagatgccaaattgcagcttagtaaggacacgtacgatgacgatctcgacaatctactggcacaaattggagatcagtatgcggacttatttttggctgccaaaaaccttagcgatgcaatcctcctatctgacatactgagagttaatactgagattaccaaggcgccgttatccgcttcaatgatcaaaaggtacgatgaacatcaccaagacttgacacttctcaaggccctagtccgtcagcaactgcctgagaaatataaggaaatattctttgatcagtcgaaaaacgggtacgcaggttatattgacggcggagcgagtcaagaggaattctacaagtttatcaaacccatattagagaagatggatgggacggaagagttgcttgtaaaactcaatcgcgaagatctactgcgaaagcagcggactttcgacaacggtagcattccacatcaaatccacttaggcgaattgcatgctatacttagaaggcaggaggatttttatccgttcctcaaagacaatcgtgaaaagattgagaaaatcctaacctttcgcataccttactatgtgggacccctggcccgagggaactctcggttcgcatggatgacaagaaagtccgaagaaacgattactccatggaattttgaggaagttgtcgataaaggtgcgtcagctcaatcgttcatcgagaggatgaccaactttgacaagaatttaccgaacgaaaaagtattgcctaagcacagtttactttacgagtatttcacagtgtacaatgaactcacgaaagttaagtatgtcactgagggcatgcgtaaacccgcctttctaagcggagaacagaagaaagcaatagtagatctgttattcaagaccaaccgcaaagtgacagttaagcaattgaaagaggactactttaagaaaattgaatgcttcgattctgtcgagatctccggggtagaagatcgatttaatgcgtcacttggtacgtatcatgacctcctaaagataattaaagataaggacttcctggataacgaagagaatgaagatatcttagaagatatagtgttgactcttaccctctttgaagatcgggaaatgattgaggaaagactaaaaacatacgctcacctgttcgacgataaggttatgaaacagttaaagaggcgtcgctatacgggctggggacgattgtcgcggaaacttatcaacgggataagagacaagcaaagtggtaaaactattctcgattttctaaagagcgacggcttcgccaataggaactttatgcagctgatccatgatgactctttaaccttcaaagaggatatacaaaaggcacaggtttccggacaaggggactcattgcacgaacatattgcgaatcttgctggttcgccagccatcaaaaagggcatactccagacagtcaaagtagtggatgagctagttaaggtcatgggacgtcacaaaccggaaaacattgtaatcgagatggcacgcgaaaatcaaacgactcagaaggggcaaaaaaacagtcgagagcggatgaagagaatagaagagggtattaaagaactgggcagccagatcttaaaggagcatcctgtggaaaatacccaattgcagaacgagaaactttacctctattacctacaaaatggaagggacatgtatgttgatcaggaactggacataaaccgtttatctgattacgacgtcgatcacattgtaccccaatcctttttgaaggacgattcaatcgacaataaagtgcttacacgctcggataagaaccgagggaaaagtgacaatgttccaagcgaggaagtcgtaaagaaaatgaagaactattggcggcagctcctaaatgcgaaactgataacgcaaagaaagttcgataacttaactaaagctgagaggggtggcttgtctgaacttgacaaggccggatttattaaacgtcagctcgtggaaacccgccaaatcacaaagcatgttgcacagatactagattcccgaatgaatacgaaatacgacgagaacgataagctgattcgggaagtcaaagtaatcactttaaagtcaaaattggtgtcggacttcagaaaggattttcaattctataaagttagggagataaataactaccaccatgcgcacgacgcttatcttaatgccgtcgtagggaccgcactcattaagaaatacccgaagctagaaagtgagtttgtgtatggtgattacaaagtttatgacgtccgtaagatgatcgcgaaaagcgaacaggagataggcaaggctacagccaaatacttcttttattctaacattatgaatttctttaagacggaaatcactctggcaaacggagagatacgcaaacgacctttaattgaaaccaatggggagacaggtgaaatcgtatgggataagggccgggacttcgcgacggtgagaaaagttttgtccatgccccaagtcaacatagtaaagaaaactgaggtgcagaccggagggttttcaaaggaatcgattcttccaaaaaggaatagtgataagctcatcgctcgtaaaaaggactgggacccgaaaaagtacggtggcttcgatagccctacagttgcctattctgtcctagtagtggcaaaagttgagaagggaaaatccaagaaactgaagtcagtcaaagaattattggggataacgattatggagcgctcgtcttttgaaaagaaccccatcgacttccttgaggcgaaaggttacaaggaagtaaaaaaggatctcataattaaactaccaaagtatagtctgtttgagttagaaaatggccgaaaacggatgttggctagcgccggagagcttcaaaaggggaacgaactcgcactaccgtctaaatacgtgaatttcctgtatttagcgtcccattacgagaagttgaaaggttcacctgaagataacgaacagaagcaactttttgttgagcagcacaaacattatctcgacgaaatcatagagcaaatttcggaattcagtaagagagtcatcctagctgatgccaatctggacaaagtattaagcgcatacaacaagcacagggataaacccatacgtgagcaggcggaaaatattatccatttgtttactcttaccaacctcggcgctccagccgcattcaagtattttgacacaacgatagatcgcaaacgatacacttctaccaaggaggtgctagacgcgacactgattcaccaatccatcacgggattatatgaaactcggatagatttgtcacagcttgggggtgacgagggagctgataagcgcaccgccgatggttccgagttcgaaagccccaagaagaagaggaaagtctaaccatcatcaccatcaccattgagtttaaacccgctgatcagcctcgactgtgccttctagttgccagccatctgttgtttgcccctcccccgtgccttccttgaccctggaaggtgccactcccactgtcctttcctaataaaatgaggaaattgcatcgcattgtctgagtaggtgtcattctattctggggggtggggtggggcaggacagcaagggggaggattgggaagacaatagcaggcatgctggggatgcggtgggctctatggcttctgaggcggaaagaaccagctggggctcgataccgtcgacctctagctagagcttggcgtaatcatggtcatagctgtttcctgtgtgaaattgttatccgctcacaattccacacaacatacgagccggaagcataaagtgtaaagcctagggtgcctaatgagtgagctaactcacattaattgcgttgcgctcactgcccgctttccagtcgggaaacctgtcgtgccagctgcattaatgaatcggccaacgcgcggggagaggcggtttgcgtattgggcgctcttccgcttcctcgctcactgactcgctgcgctcggtcgttcggctgcggcgagcggtatcagctcactcaaaggcggtaatacggttatccacagaatcaggggataacgcaggaaagaacatgtgagcaaaaggccagcaaaaggccaggaaccgtaaaaaggccgcgttgctggcgtttttccataggctccgcccccctgacgagcatcacaaaaatcgacgctcaagtcagaggtggcgaaacccgacaggactataaagataccaggcgtttccccctggaagctccctcgtgcgctctcctgttccgaccctgccgcttaccggatacctgtccgcctttctcccttcgggaagcgtggcgctttctcatagctcacgctgtaggtatctcagttcggtgtaggtcgttcgctccaagctgggctgtgtgcacgaaccccccgttcagcccgaccgctgcgccttatccggtaactatcgtcttgagtccaacccggtaagacacgacttatcgccactggcagcagccactggtaacaggattagcagagcgaggtatgtaggcggtgctacagagttcttgaagtggtggcctaactacggctacactagaagaacagtatttggtatctgcgctctgctgaagccagttaccttcggaaaaagagttggtagctcttgatccggcaaacaaaccaccgctggtagcggtggtttttttgtttgcaagcagcagattacgcgcagaaaaaaaggatctcaagaagatcctttgatcttttctacggggtctgacgctcagtggaacgaaaactcacgttaagggattttggtcatgagattatcaaaaaggatcttcacctagatccttttaaattaaaaatgaagttttaaatcaatctaaagtatatatgagtaaacttggtctgacagttaccaatgcttaatcagtgaggcacctatctcagcgatctgtctatttcgttcatccatagttgcctgactccccgtcgtgtagataactacgatacgggagggcttaccatctggccccagtgctgcaatgataccgcgagacccacgctcaccggctccagatttatcagcaataaaccagccagccggaagggccgagcgcagaagtggtcctgcaactttatccgcctccatccagtctattaattgttgccgggaagctagagtaagtagttcgccagttaatagtttgcgcaacgttgttgccattgctacaggcatcgtggtgtcacgctcgtcgtttggtatggcttcattcagctccggttcccaacgatcaaggcgagttacatgatcccccatgttgtgcaaaaaagcggttagctccttcggtcctccgatcgttgtcagaagtaagttggccgcagtgttatcactcatggttatggcagcactgcataattctcttactgtcatgccatccgtaagatgcttttctgtgactggtgagtactcaaccaagtcattctgagaatagtgtatgcggcgaccgagttgctcttgcccggcgtcaatacgggataataccgcgccacatagcagaactttaaaagtgctcatcattggaaaacgttcttcggggcgaaaactctcaaggatcttaccgctgttgagatccagttcgatgtaacccactcgtgcacccaactgatcttcagcatcttttactttcaccagcgtttctgggtgagcaaaaacaggaaggcaaaatgccgcaaaaaagggaataagggcgacacggaaatgttgaatactcatactcttcctttttcaatattattgaagcatttatcagggttattgtctcatgagcggatacatatttgaatgtatttagaaaaataaacaaataggggttccgcgcacatttccccgaaaagtgccacctgacgtcgaccctagggtcgactctcagtacaatctgctctgatgccgaagcttcatagttaagccagtatctgctcc

SEQ ID NO: 724 - DNA, 6653 bp, synthetic construct
  source 1..6653: mol_type = other DNA
ctgcttgtgtgttggaggtcgctgagtagtgcgcgagcaaaatttaagctacaacaaggcaaggcttgaccgacaattgcatgaagaatctgcttagggttaggcgttttgcgctgcttcgcgatgtacgggccagatatacgcgttgacattgattattgactagttattaatagtaatcaattacggggtcattagttcatagcccatatatggagttccgcgttacataacttacggtaaatggcccgcctggctgaccgcccaacgacccccgcccattgacgtcaataatgacgtatgttcccatagtaacgccaatagggactttccattgacgtcaatgggtggagtatttacggtaaactgcccacttggcagtacatcaagtgtatcatatgccaagtacgccccctattgacgtcaatgacggtaaatggcccgcctggcattatgcccagtacatgaccttatgggactttcctacttggcagtacatctacgtattagtcatcgctattaccatggtgatgcggttttggcagtacatcaatgggcgtggatagcggtttgactcacggggatttccaagtctccaccccattgacgtcaatgggagtttgttttggcaccaaaatcaacgggactttccaaaatgtcgtaacaactccgccccattgacgcaaatgggcggtaggcgtgtacggtgggaggtctatataagcagagctggtttagtgaaccgtcagatccgctagagatccgcggccgcgatgaccgactctcaaaatgacactgatgaatactggatgggtgaggctcttaaactggcgcagaaagcctgggacgaaggtgaagtgcctgttggcgccatcctggtccggaaaggggaagtgattgggcacgggtggaatcgaagcattgggtcacacgatccatccgctcatgcagaaattatggcgatcagagaggccggagttcgaatcggaaattatagaatgcttgataccgtgctgtacgtgaccttagagccctgcgcaatgtgcgcaggtgccctggttcatggaagaattagccggctggtgtttggagcagagaaccccaagactggggcttgtggatctgttatggacattgcaaggcatccagccctgaaccatcaactccaagttgatggcggagtcatggctgccccctgcgcccgcttattgtccgacttcttccgctggcgccgtgcgcaaaagaaagctgccagagataactctagcggaaatggtacctcaggcgggtcttccggcggcagtagtgggagcgaaacaccgggcacaagtgagagcgcaacaccggaatcatctggcggttcaagcggcggatccatggaacgcgaattggtcttgggaattgcgtatggcggaaagtacactggtctggccgtcgtcgataggagacataaccaagtgctctacgcaaatagactgaagatgagggatgatgtcgccggcattcttaaagaccgccggaagcaaaggggcatcaggcgcaccgcccaaacaaagaagaagcgtttgcgagaacttaagaattatctcaaaagtataggttacaatgagtcaaccgctacttttgaaacggtttactcactggctcacaagaggggctatgactatgctgatatgcccgaggaaaagactagtgaagaaattgaagcaatggacgtggaagagcggaaacaatgggaaaaggagaaacaagagtgggaagagactaaacgaaactctagacatcgtaaagaagtcgtgaaggatgtccacaaagctatgattgaaggcagggctactgaggaacaaattaaaagagtggaacggatatttaataaacaatacagacccaagcgattcaataatcgcatcctgacaaaatgcaaggtcgaagactgcggagtcaacacccctttgaggaagaatgttagggatctcctgatagaaaatattgtgaggttcttcccaatagaacaatctgaaaaggataacttgaaggacgccgtgttggataagaatagaagggaagaagtcaagtccttctttaggaaacataaaaccgatgagcatatacgcaaacaggtgtatgatatagccgataacaagctctctggcaggacagtcttttgcaaggagcacattctggaacacacagaacattctaaggaagagaggaaagtattcagactcgctccgagtcttaagaccaaaatagagaatgtccttgccgtaattaaagatgaaatcctgcctaagttcaccgtcaataaagtcgtgatggagtctaacaatttcgacatcgctgccaaaactcaaggcaagaaacggctcgccaaagaagagtatggtaagggaccacgtgaaggcaaagaaaccaggaaagaagctctcctgcgggagactgatggcagatgcatatattgtgggaagtcaatagatatctccaatgctcatgacgaccatatctttcctcgaaaggccggcggactgaacatcttcgcaaatcttgtagcatgctgtgccgtgtgtaatgagaataagaaagggcggacacctctggaatcaggtattagcccaaagccagagatcatcgctttcatgaagaatgatctcaagaagaagatccttgaagacgcccgaaacataaacacggtggatttcaataagtacatgtcacatgccagcattggctggagatatatgagagaccgacttagggaatctgccgggaataagaagctcccgattgagaggcaaagcgggatctatacggcatactttcggagatggtggggattcaagaaggagcggggcaatacactccaccatgccttggatgctgttatcctggcgtcccggaaaggatatagcgatgacgggttggttgacatgacattgaaacctaaatacaacaaaggtggagagttcgatccagaaaagcacctgccagaacctattgagttcaaaatggacaaaggttccaggggatctgcacttcatgatagaaaccccttgtcctataagaagggaattattactcgtaggttcatggtcactgaaatcgagtgcgggaaagaggatgacgtgatctcagaaacttacagagagaaactcaaagaggcattcaagcgctttgataccaagaaaggaaaatgtctgaccgacaaggaagccaaagaggccggattctgcatcaagaagaatgagctggtgatgagtcttaaatgttccatcaaaggaacaggccctgggcaaatgattcgcattaacaacaatgtattcaaaactaacgttcataatgttggggttgatgtttatctcgacgagaaaggcaagaagaaagcctacgaaagaaagaacccgcggttgagcaaacatttcattgagccaccaccacagcctaatggaagggttagcttcactctcaaacggagagacatggtaactgtcgagggagaagatgcaatttataggatcaagaagctcggtacatctcccactatagaggccgtcgtaggatcagacggaaagacccggactgtgtcagcaacaaaacttaccaaggctaacagtgctgagctcgaggagggagctgataagcgcaccgccgatggttccgagttcgaaagccccaagaagaagaggaaagtctaaccatcatcaccatcaccattgagtttaaacccgctgatcagcctcgactgtgccttctagttgccagccatctgttgtttgcccctcccccgtgccttccttgaccctggaaggtgccactcccactgtcctttcctaataaaatgaggaaattgcatcgcattgtctgagtaggtgtcattctattctggggggtggggtggggcaggacagcaagggggaggattgggaagacaatagcaggcatgctggggatgcggtgggctctatggcttctgaggcggaaagaaccagctggggctcgataccgtcgacctctagctagagcttggcgtaatcatggtcatagctgtttcctgtgtgaaattgttatccgctcacaattccacacaacatacgagccggaagcataaagtgtaaagcctagggtgcctaatgagtgagctaactcacattaattgcgttgcgctcactgcccgctttccagtcgggaaacctgtcgtgccagctgcattaatgaatcggccaacgcgcggggagaggcggtttgcgtattgggcgctcttccgcttcctcgctcactgactcgctgcgctcggtcgttcggctgcggcgagcggtatcagctcactcaaaggcggtaatacggttatccacagaatcaggggataacgcaggaaagaacatgtgagcaaaaggccagcaaaaggccaggaaccgtaaaaaggccgcgttgctggcgtttttccataggctccgcccccctgacgagcatcacaaaaatcgacgctcaagtcagaggtggcgaaacccgacaggactataaagataccaggcgtttccccctggaagctccctcgtgcgctctcctgttccgaccctgccgcttaccggatacctgtccgcctttctcccttcgggaagcgtggcgctttctcatagctcacgctgtaggtatctcagttcggtgtaggtcgttcgctccaagctgggctgtgtgcacgaaccccccgttcagcccgaccgctgcgccttatccggtaactatcgtcttgagtccaacccggtaagacacgacttatcgccactggcagcagccactggtaacaggattagcagagcgaggtatgtaggcggtgctacagagttcttgaagtggtggcctaactacggctacactagaagaacagtatttggtatctgcgctctgctgaagccagttaccttcggaaaaagagttggtagctcttgatccggcaaacaaaccaccgctggtagcggtggtttttttgtttgcaagcagcagattacgcgcagaaaaaaaggatctcaagaagatcctttgatcttttctacggggtctgacgctcagtggaacgaaaactcacgttaagggattttggtcatgagattatcaaaaaggatcttcacctagatccttttaaattaaaaatgaagttttaaatcaatctaaagtatatatgagtaaacttggtctgacagttaccaatgcttaatcagtgaggcacctatctcagcgatctgtctatttcgttcatccatagttgcctgactccccgtcgtgtagataactacgatacgggagggcttaccatctggccccagtgctgcaatgataccgcgagacccacgctcaccggctccagatttatcagcaataaaccagccagccggaagggccgagcgcagaagtggtcctgcaactttatccgcctccatccagtctattaattgttgccgggaagctagagtaagtagttcgccagttaatagtttgcgcaacgttgttgccattgctacaggcatcgtggtgtcacgctcgtcgtttggtatggcttcattcagctccggttcccaacgatcaaggcgagttacatgatcccccatgttgtgcaaaaaagcggttagctccttcggtcctccgatcgttgtcagaagtaagttggccgcagtgttatcactcatggttatggcagcactgcataattctcttactgtcatgccatccgtaagatgcttttctgtgactggtgagtactcaaccaagtcattctgagaatagtgtatgcggcgaccgagttgctcttgcccggcgtcaatacgggataataccgcgccacatagcagaactttaaaagtgctcatcattggaaaacgttcttcggggcgaaaactctcaaggatcttaccgctgttgagatccagttcgatgtaacccactcgtgcacccaactgatcttcagcatcttttactttcaccagcgtttctgggtgagcaaaaacaggaaggcaaaatgccgcaaaaaagggaataagggcgacacggaaatgttgaatactcatactcttcctttttcaatattattgaagcatttatcagggttattgtctcatgagcggatacatatttgaatgtatttagaaaaataaacaaataggggttccgcgcacatttccccgaaaagtgccacctgacgtcgaccctagggtcgactctcagtacaatctgctctgatgccgagagggcctatttcccatgattccttcatatttgcatatacgatacaaggctgttagagagataattagaattaatttgactgtaaacacaaagatattagtacaaaatacgtgacgtagaaagtaataatttcttgggtagtttgcagttttaaaattatgttttaaaatggactatcatatgcttaccgtaacttgaaagtatttcgatttcttggctttatatatcttgtggaaaggacgaaacaccgaacacaaagcatagactgcgttacagttaagaaattaattgtaaaacgcctatacagtgaagggatatacgcttgggtttgtccagcctgagcctctatgccagaaatggcgccttcatcgtgggttaggacatttaatttttttcatagttaagccagtatctgctcc

SEQ ID NO: 725 - DNA, 6653 bp, synthetic construct
  source 1..6653: mol_type = other DNA
ctgcttgtgtgttggaggtcgctgagtagtgcgcgagcaaaatttaagctacaacaaggcaaggcttgaccgacaattgcatgaagaatctgcttagggttaggcgttttgcgctgcttcgcgatgtacgggccagatatacgcgttgacattgattattgactagttattaatagtaatcaattacggggtcattagttcatagcccatatatggagttccgcgttacataacttacggtaaatggcccgcctggctgaccgcccaacgacccccgcccattgacgtcaataatgacgtatgttcccatagtaacgccaatagggactttccattgacgtcaatgggtggagtatttacggtaaactgcccacttggcagtacatcaagtgtatcatatgccaagtacgccccctattgacgtcaatgacggtaaatggcccgcctggcattatgcccagtacatgaccttatgggactttcctacttggcagtacatctacgtattagtcatcgctattaccatggtgatgcggttttggcagtacatcaatgggcgtggatagcggtttgactcacggggatttccaagtctccaccccattgacgtcaatgggagtttgttttggcaccaaaatcaacgggactttccaaaatgtcgtaacaactccgccccattgacgcaaatgggcggtaggcgtgtacggtgggaggtctatataagcagagctggtttagtgaaccgtcagatccgctagagatccgcggccgcgatgagcgaagtcgaattttcccatgagtactggatgcggcatgcacttacattggctaaaagagctagggacgaacgcgaagtaccagtaggcgcagtactggtcttaaacaatagggtgataggggaaggatggaaccgggcaatcgggttacacgaccctacagcgcatgcagaaattatggctttgcggcaaggtggccttgtcatgcagaattataggctcatagatgcgacgctgtatgtgacattcgagccttgtgtaatgtgtgctggcgccatgattcattcaaggattggacgcgtagtgttcggagtgcgaaacgcaaagacaggagccgctgggagtttaatggacgtattacatcatcctggcatgaatcacagggtggaaatcaccgaagggattctcgccgatgagtgtgcggctcttctttgtaggttctttcgtatgcctcggcgcgtgttcaacgcgcagaagaaggcacaaagcagtacagatggtacctcaggcgggtcttccggcggcagtagtgggagcgaaacaccgggcacaagtgagagcgcaacaccggaatcatctggcggttcaagcggcggatccatggaacgcgaattggtcttgggaattgcgtatggcggaaagtacactggtctggccgtcgtcgataggagacataaccaagtgctctacgcaaatagactgaagatgagggatgatgtcgccggcattcttaaagaccgccggaagcaaaggggcatcaggcgcaccgcccaaacaaagaagaagcgtttgcgagaacttaagaattatctcaaaagtataggttacaatgagtcaaccgctacttttgaaacggtttactcactggctcacaagaggggctatgactatgctgatatgcccgaggaaaagactagtgaagaaattgaagcaatggacgtggaagagcggaaacaatgggaaaaggagaaacaagagtgggaagagactaaacgaaactctagacatcgtaaagaagtcgtgaaggatgtccacaaagctatgattgaaggcagggctactgaggaacaaattaaaagagtggaacggatatttaataaacaatacagacccaagcgattcaataatcgcatcctgacaaaatgcaaggtcgaagactgcggagtcaacacccctttgaggaagaatgttagggatctcctgatagaaaatattgtgaggttcttcccaatagaacaatctgaaaaggataacttgaaggacgccgtgttggataagaatagaagggaagaagtcaagtccttctttaggaaacataaaaccgatgagcatatacgcaaacaggtgtatgatatagccgataacaagctctctggcaggacagtcttttgcaaggagcacattctggaacacacagaacattctaaggaagagaggaaagtattcagactcgctccgagtcttaagaccaaaatagagaatgtccttgccgtaattaaagatgaaatcctgcctaagttcaccgtcaataaagtcgtgatggagtctaacaatttcgacatcgctgccaaaactcaaggcaagaaacggctcgccaaagaagagtatggtaagggaccacgtgaaggcaaagaaaccaggaaagaagctctcctgcgggagactgatggcagatgcatatattgtgggaagtcaatagatatctccaatgctcatgacgaccatatctttcctcgaaaggccggcggactgaacatcttcgcaaatcttgtagcatgctgtgccgtgtgtaatgagaataagaaagggcggacacctctggaatcaggtattagcccaaagccagagatcatcgctttcatgaagaatgatctcaagaagaagatccttgaagacgcccgaaacataaacacggtggatttcaataagtacatgtcacatgccagcattggctggagatatatgagagaccgacttagggaatctgccgggaataagaagctcccgattgagaggcaaagcgggatctatacggcatactttcggagatggtggggattcaagaaggagcggggcaatacactccaccatgccttggatgctgttatcctggcgtcccggaaaggatatagcgatgacgggttggttgacatgacattgaaacctaaatacaacaaaggtggagagttcgatccagaaaagcacctgccagaacctattgagttcaaaatggacaaaggttccaggggatctgcacttcatgatagaaaccccttgtcctataagaagggaattattactcgtaggttcatggtcactgaaatcgagtgcgggaaagaggatgacgtgatctcagaaacttacagagagaaactcaaagaggcattcaagcgctttgataccaagaaaggaaaatgtctgaccgacaaggaagccaaagaggccggattctgcatcaagaagaatgagctggtgatgagtcttaaatgttccatcaaaggaacaggccctgggcaaatgattcgcattaacaacaatgtattcaaaactaacgttcataatgttggggttgatgtttatctcgacgagaaaggcaagaagaaagcctacgaaagaaagaacccgcggttgagcaaacatttcattgagccaccaccacagcctaatggaagggttagcttcactctcaaacggagagacatggtaactgtcgagggagaagatgcaatttataggatcaagaagctcggtacatctcccactatagaggccgtcgtaggatcagacggaaagacccggactgtgtcagcaacaaaacttaccaaggctaacagtgctgagctcgaggagggagctgataagcgcaccgccgatggttccgagttcgaaagccccaagaagaagaggaaagtctaaccatcatcaccatcaccattgagtttaaacccgctgatcagcctcgactgtgccttctagttgccagccatctgttgtttgcccctcccccgtgccttccttgaccctggaaggtgccactcccactgtcctttcctaataaaatgaggaaattgcatcgcattgtctgagtaggtgtcattctattctggggggtggggtggggcaggacagcaagggggaggattgggaagacaatagcaggcatgctggggatgcggtgggctctatggcttctgaggcggaaagaaccagctggggctcgataccgtcgacctctagctagagcttggcgtaatcatggtcatagctgtttcctgtgtgaaattgttatccgctcacaattccacacaacatacgagccggaagcataaagtgtaaagcctagggtgcctaatgagtgagctaactcacattaattgcgttgcgctcactgcccgctttccagtcgggaaacctgtcgtgccagctgcattaatgaatcggccaacgcgcggggagaggcggtttgcgtattgggcgctcttccgcttcctcgctcactgactcgctgcgctcggtcgttcggctgcggcgagcggtatcagctcactcaaaggcggtaatacggttatccacagaatcaggggataacgcaggaaagaacatgtgagcaaaaggccagcaaaaggccaggaaccgtaaaaaggccgcgttgctggcgtttttccataggctccgcccccctgacgagcatcacaaaaatcgacgctcaagtcagaggtggcgaaacccgacaggactataaagataccaggcgtttccccctggaagctccctcgtgcgctctcctgttccgaccctgccgcttaccggatacctgtccgcctttctcccttcgggaagcgtggcgctttctcatagctcacgctgtaggtatctcagttcggtgtaggtcgttcgctccaagctgggctgtgtgcacgaaccccccgttcagcccgaccgctgcgccttatccggtaactatcgtcttgagtccaacccggtaagacacgacttatcgccactggcagcagccactggtaacaggattagcagagcgaggtatgtaggcggtgctacagagttcttgaagtggtggcctaactacggctacactagaagaacagtatttggtatctgcgctctgctgaagccagttaccttcggaaaaagagttggtagctcttgatccggcaaacaaaccaccgctggtagcggtggtttttttgtttgcaagcagcagattacgcgcagaaaaaaaggatctcaagaagatcctttgatcttttctacggggtctgacgctcagtggaacgaaaactcacgttaagggattttggtcatgagattatcaaaaaggatcttcacctagatccttttaaattaaaaatgaagttttaaatcaatctaaagtatatatgagtaaacttggtctgacagttaccaatgcttaatcagtgaggcacctatctcagcgatctgtctatttcgttcatccatagttgcctgactccccgtcgtgtagataactacgatacgggagggcttaccatctggccccagtgctgcaatgataccgcgagacccacgctcaccggctccagatttatcagcaataaaccagccagccggaagggccgagcgcagaagtggtcctgcaactttatccgcctccatccagtctattaattgttgccgggaagctagagtaagtagttcgccagttaatagtttgcgcaacgttgttgccattgctacaggcatcgtggtgtcacgctcgtcgtttggtatggcttcattcagctccggttcccaacgatcaaggcgagttacatgatcccccatgttgtgcaaaaaagcggttagctccttcggtcctccgatcgttgtcagaagtaagttggccgcagtgttatcactcatggttatggcagcactgcataattctcttactgtcatgccatccgtaagatgcttttctgtgactggtgagtactcaaccaagtcattctgagaatagtgtatgcggcgaccgagttgctcttgcccggcgtcaatacgggataataccgcgccacatagcagaactttaaaagtgctcatcattggaaaacgttcttcggggcgaaaactctcaaggatcttaccgctgttgagatccagttcgatgtaacccactcgtgcacccaactgatcttcagcatcttttactttcaccagcgtttctgggtgagcaaaaacaggaaggcaaaatgccgcaaaaaagggaataagggcgacacggaaatgttgaatactcatactcttcctttttcaatattattgaagcatttatcagggttattgtctcatgagcggatacatatttgaatgtatttagaaaaataaacaaataggggttccgcgcacatttccccgaaaagtgccacctgacgtcgaccctagggtcgactctcagtacaatctgctctgatgccgagagggcctatttcccatgattccttcatatttgcatatacgatacaaggctgttagagagataattagaattaatttgactgtaaacacaaagatattagtacaaaatacgtgacgtagaaagtaataatttcttgggtagtttgcagttttaaaattatgttttaaaatggactatcatatgcttaccgtaacttgaaagtatttcgatttcttggctttatatatcttgtggaaaggacgaaacaccgaacacaaagcatagactgcgttacagttaagaaattaattgtaaaacgcctatacagtgaagggatatacgcttgggtttgtccagcctgagcctctatgccagaaatggcgccttcatcgtgggttaggacatttaatttttttcatagttaagccagtatctgctcc

SEQ ID NO: 726 - DNA, 8468 bp, synthetic construct
  source 1..8468: mol_type = other DNA
ctgcttgtgtgttggaggtcgctgagtagtgcgcgagcaaaatttaagctacaacaaggcaaggcttgaccgacaattgcatgaagaatctgcttagggttaggcgttttgcgctgcttcgcgatgtacgggccagatatacgcgttgacattgattattgactagttattaatagtaatcaattacggggtcattagttcatagcccatatatggagttccgcgttacataacttacggtaaatggcccgcctggctgaccgcccaacgacccccgcccattgacgtcaataatgacgtatgttcccatagtaacgccaatagggactttccattgacgtcaatgggtggagtatttacggtaaactgcccacttggcagtacatcaagtgtatcatatgccaagtacgccccctattgacgtcaatgacggtaaatggcccgcctggcattatgcccagtacatgaccttatgggactttcctacttggcagtacatctacgtattagtcatcgctattaccatggtgatgcggttttggcagtacatcaatgggcgtggatagcggtttgactcacggggatttccaagtctccaccccattgacgtcaatgggagtttgttttggcaccaaaatcaacgggactttccaaaatgtcgtaacaactccgccccattgacgcaaatgggcggtaggcgtgtacggtgggaggtctatataagcagagctggtttagtgaaccgtcagatccgctagagatccgcggccgcgatgaccgactctcaaaatgacactgatgaatactggatgggtgaggctcttaaactggcgcagaaagcctgggacgaaggtgaagtgcctgttggcgccatcctggtccggaaaggggaagtgattgggcacgggtggaatcgaagcattgggtcacacgatccatccgctcatgcagaaattatggcgatcagagaggccggagttcgaatcggaaattatagaatgcttgataccgtgctgtacgtgaccttagagccctgcgcaatgtgcgcaggtgccctggttcatggaagaattagccggctggtgtttggagcagagaaccccaagactggggcttgtggatctgttatggacattgcaaggcatccagccctgaaccatcaactccaagttgatggcggagtcatggctgccccctgcgcccgcttattgtccgacttcttccgctggcgccgtgcgcaaaagaaagctgccagagataactctagcggaaatggtacctcaggcgggtcttccggcggcagtagtgggagcgaaacaccgggcacaagtgagagcgcaacaccggaatcatctggcggttcaagcggcggatccatggataaaaagtattctattggtttagccatcggcactaattccgttggatgggctgtcataaccgatgaatacaaagtaccttcaaagaaatttaaggtgttggggaacacagaccgtcattcgattaaaaagaatcttatcggtgccctcctattcgatagtggcgaaacggcagaggcgactcgcctgaaacgaaccgctcggagaaggtatacacgtcgcaagaaccgaatatgttacttacaagaaatttttagcaatgagatggccaaagttgacgattctttctttcaccgtttggaagagtccttccttgtcgaagaggacaagaaacatgaacggcaccccatctttggaaacatagtagatgaggtggcatatcatgaaaagtacccaacgatttatcacctcagaaaaaagctagttgactcaactgataaagcggacctgaggttaatctacttggctcttgcccatatgataaagttccgtgggcactttctcattgagggtgatctaaatccggacaactcggatgtcgacaaactgttcatccagttagtacaaacctataatcagttgtttgaagagaaccctataaatgcaagtggcgtggatgcgaaggctattcttagcgcccgcctctctaaatcccgacggctagaaaacctgatcgcacaattacccggagagaagaaaaatgggttgttcggtaaccttatagcgctctcactaggcctgacaccaaattttaagtcgaacttcgacttagctgaagatgccaaattgcagcttagtaaggacacgtacgatgacgatctcgacaatctactggcacaaattggagatcagtatgcggacttatttttggctgccaaaaaccttagcgatgcaatcctcctatctgacatactgagagttaatactgagattaccaaggcgccgttatccgcttcaatgatcaaaaggtacgatgaacatcaccaagacttgacacttctcaaggccctagtccgtcagcaactgcctgagaaatataaggaaatattctttgatcagtcgaaaaacgggtacgcaggttatattgacggcggagcgagtcaagaggaattctacaagtttatcaaacccatattagagaagatggatgggacggaagagttgcttgtaaaactcaatcgcgaagatctactgcgaaagcagcggactttcgacaacggtagcattccacatcaaatccacttaggcgaattgcatgctatacttagaaggcaggaggatttttatccgttcctcaaagacaatcgtgaaaagattgagaaaatcctaacctttcgcataccttactatgtgggacccctggcccgagggaactctcggttcgcatggatgacaagaaagtccgaagaaacgattactccatggaattttgaggaagttgtcgataaaggtgcgtcagctcaatcgttcatcgagaggatgaccaactttgacaagaatttaccgaacgaaaaagtattgcctaagcacagtttactttacgagtatttcacagtgtacaatgaactcacgaaagttaagtatgtcactgagggcatgcgtaaacccgcctttctaagcggagaacagaagaaagcaatagtagatctgttattcaagaccaaccgcaaagtgacagttaagcaattgaaagaggactactttaagaaaattgaatgcttcgattctgtcgagatctccggggtagaagatcgatttaatgcgtcacttggtacgtatcatgacctcctaaagataattaaagataaggacttcctggataacgaagagaatgaagatatcttagaagatatagtgttgactcttaccctctttgaagatcgggaaatgattgaggaaagactaaaaacatacgctcacctgttcgacgataaggttatgaaacagttaaagaggcgtcgctatacgggctggggacgattgtcgcggaaacttatcaacgggataagagacaagcaaagtggtaaaactattctcgattttctaaagagcgacggcttcgccaataggaactttatgcagctgatccatgatgactctttaaccttcaaagaggatatacaaaaggcacaggtttccggacaaggggactcattgcacgaacatattgcgaatcttgctggttcgccagccatcaaaaagggcatactccagacagtcaaagtagtggatgagctagttaaggtcatgggacgtcacaaaccggaaaacattgtaatcgagatggcacgcgaaaatcaaacgactcagaaggggcaaaaaaacagtcgagagcggatgaagagaatagaagagggtattaaagaactgggcagccagatcttaaaggagcatcctgtggaaaatacccaattgcagaacgagaaactttacctctattacctacaaaatggaagggacatgtatgttgatcaggaactggacataaaccgtttatctgattacgacgtcgatcacattgtaccccaatcctttttgaaggacgattcaatcgacaataaagtgcttacacgctcggataagaaccgagggaaaagtgacaatgttccaagcgaggaagtcgtaaagaaaatgaagaactattggcggcagctcctaaatgcgaaactgataacgcaaagaaagttcgataacttaactaaagctgagaggggtggcttgtctgaacttgacaaggccggatttattaaacgtcagctcgtggaaacccgccaaatcacaaagcatgttgcacagatactagattcccgaatgaatacgaaatacgacgagaacgataagctgattcgggaagtcaaagtaatcactttaaagtcaaaattggtgtcggacttcagaaaggattttcaattctataaagttagggagataaataactaccaccatgcgcacgacgcttatcttaatgccgtcgtagggaccgcactcattaagaaatacccgaagctagaaagtgagtttgtgtatggtgattacaaagtttatgacgtccgtaagatgatcgcgaaaagcgaacaggagataggcaaggctacagccaaatacttcttttattctaacattatgaatttctttaagacggaaatcactctggcaaacggagagatacgcaaacgacctttaattgaaaccaatggggagacaggtgaaatcgtatgggataagggccgggacttcgcgacggtgagaaaagttttgtccatgccccaagtcaacatagtaaagaaaactgaggtgcagaccggagggttttcaaaggaatcgattcttccaaaaaggaatagtgataagctcatcgctcgtaaaaaggactgggacccgaaaaagtacggtggcttcgatagccctacagttgcctattctgtcctagtagtggcaaaagttgagaagggaaaatccaagaaactgaagtcagtcaaagaattattggggataacgattatggagcgctcgtcttttgaaaagaaccccatcgacttccttgaggcgaaaggttacaaggaagtaaaaaaggatctcataattaaactaccaaagtatagtctgtttgagttagaaaatggccgaaaacggatgttggctagcgccggagagcttcaaaaggggaacgaactcgcactaccgtctaaatacgtgaatttcctgtatttagcgtcccattacgagaagttgaaaggttcacctgaagataacgaacagaagcaactttttgttgagcagcacaaacattatctcgacgaaatcatagagcaaatttcggaattcagtaagagagtcatcctagctgatgccaatctggacaaagtattaagcgcatacaacaagcacagggataaacccatacgtgagcaggcggaaaatattatccatttgtttactcttaccaacctcggcgctccagccgcattcaagtattttgacacaacgatagatcgcaaacgatacacttctaccaaggaggtgctagacgcgacactgattcaccaatccatcacgggattatatgaaactcggatagatttgtcacagcttgggggtgacgagggagctgataagcgcaccgccgatggttccgagttcgaaagccccaagaagaagaggaaagtctaaccatcatcaccatcaccattgagtttaaacccgctgatcagcctcgactgtgccttctagttgccagccatctgttgtttgcccctcccccgtgccttccttgaccctggaaggtgccactcccactgtcctttcctaataaaatgaggaaattgcatcgcattgtctgagtaggtgtcattctattctggggggtggggtggggcaggacagcaagggggaggattgggaagacaatagcaggcatgctggggatgcggtgggctctatggcttctgaggcggaaagaaccagctggggctcgataccgtcgacctctagctagagcttggcgtaatcatggtcatagctgtttcctgtgtgaaattgttatccgctcacaattccacacaacatacgagccggaagcataaagtgtaaagcctagggtgcctaatgagtgagctaactcacattaattgcgttgcgctcactgcccgctttccagtcgggaaacctgtcgtgccagctgcattaatgaatcggccaacgcgcggggagaggcggtttgcgtattgggcgctcttccgcttcctcgctcactgactcgctgcgctcggtcgttcggctgcggcgagcggtatcagctcactcaaaggcggtaatacggttatccacagaatcaggggataacgcaggaaagaacatgtgagcaaaaggccagcaaaaggccaggaaccgtaaaaaggccgcgttgctggcgtttttccataggctccgcccccctgacgagcatcacaaaaatcgacgctcaagtcagaggtggcgaaacccgacaggactataaagataccaggcgtttccccctggaagctccctcgtgcgctctcctgttccgaccctgccgcttaccggatacctgtccgcctttctcccttcgggaagcgtggcgctttctcatagctcacgctgtaggtatctcagttcggtgtaggtcgttcgctccaagctgggctgtgtgcacgaaccccccgttcagcccgaccgctgcgccttatccggtaactatcgtcttgagtccaacccggtaagacacgacttatcgccactggcagcagccactggtaacaggattagcagagcgaggtatgtaggcggtgctacagagttcttgaagtggtggcctaactacggctacactagaagaacagtatttggtatctgcgctctgctgaagccagttaccttcggaaaaagagttggtagctcttgatccggcaaacaaaccaccgctggtagcggtggtttttttgtttgcaagcagcagattacgcgcagaaaaaaaggatctcaagaagatcctttgatcttttctacggggtctgacgctcagtggaacgaaaactcacgttaagggattttggtcatgagattatcaaaaaggatcttcacctagatccttttaaattaaaaatgaagttttaaatcaatctaaagtatatatgagtaaacttggtctgacagttaccaatgcttaatcagtgaggcacctatctcagcgatctgtctatttcgttcatccatagttgcctgactccccgtcgtgtagataactacgatacgggagggcttaccatctggccccagtgctgcaatgataccgcgagacccacgctcaccggctccagatttatcagcaataaaccagccagccggaagggccgagcgcagaagtggtcctgcaactttatccgcctccatccagtctattaattgttgccgggaagctagagtaagtagttcgccagttaatagtttgcgcaacgttgttgccattgctacaggcatcgtggtgtcacgctcgtcgtttggtatggcttcattcagctccggttcccaacgatcaaggcgagttacatgatcccccatgttgtgcaaaaaagcggttagctccttcggtcctccgatcgttgtcagaagtaagttggccgcagtgttatcactcatggttatggcagcactgcataattctcttactgtcatgccatccgtaagatgcttttctgtgactggtgagtactcaaccaagtcattctgagaatagtgtatgcggcgaccgagttgctcttgcccggcgtcaatacgggataataccgcgccacatagcagaactttaaaagtgctcatcattggaaaacgttcttcggggcgaaaactctcaaggatcttaccgctgttgagatccagttcgatgtaacccactcgtgcacccaactgatcttcagcatcttttactttcaccagcgtttctgggtgagcaaaaacaggaaggcaaaatgccgcaaaaaagggaataagggcgacacggaaatgttgaatactcatactcttcctttttcaatattattgaagcatttatcagggttattgtctcatgagcggatacatatttgaatgtatttagaaaaataaacaaataggggttccgcgcacatttccccgaaaagtgccacctgacgtcgaccctagggtcgactctcagtacaatctgctctgatgccgagagggcctatttcccatgattccttcatatttgcatatacgatacaaggctgttagagagataattagaattaatttgactgtaaacacaaagatattagtacaaaatacgtgacgtagaaagtaataatttcttgggtagtttgcagttttaaaattatgttttaaaatggactatcatatgcttaccgtaacttgaaagtatttcgatttcttggctttatatatcttgtggaaaggacgaaacaccgaacacaaagcatagactgcgttttagagctagaaatagcaagttaaaataaggctagtccgttatcaacttgaaaaagtggcaccgagtcggtgcttttttttcatagttaagccagtatctgctcc

SEQ ID NO: 727 - protein, 969 aa, synthetic construct; identical to SEQ ID NO: 586

SEQ ID NO: 728 - protein, 1588 aa, synthetic construct
MGSSHHHHHHSEVEFSHEYWMRHALTLAKRARDEREVPVGAVLVLNNRVIGEGWNRAIGLHDPTAHAEIMALRQGGLVMQNYRLIDATLYSTFEPCVMCAGAMIHSRIGRVVFGVRNAKTGAAGSLMDVLHYPGMNHRVEITEGILADECAALLCYFFRMPRRVFNAQKKAQSSTDSGGSSGGSSGSETPGTSESATPESSGGSSGGSMDKKYSIGLAIGTNSVGWAVITDEYKVPSKKFKVLGNTDRHSIKKNLIGALLFDSGETAEATRLKRTARRRYTRRKNRICYLQEIFSNEMAKVDDSFFHRLEESFLVEEDKKHERHPIFGNIVDEVAYHEKYPTIYHLRKKLVDSTDKADLRLIYLALAHMIKFRGHFLIEGDLNPDNSDVDKLFIQLVQTYNQLFEENPINASGVDAKAILSARLSKSRRLENLIAQLPGEKKNGLFGNLIALSLGLTPNFKSNFDLAEDAKLQLSKDTYDDDLDNLLAQIGDQYADLFLAAKNLSDAILLSDILRVNTEITKAPLSASMIKRYDEHHQDLTLLKALVRQQLPEKYKEIFFDQSKNGYAGYIDGGASQEEFYKFIKPILEKMDGTEELLVKLNREDLLRKQRTFDNGSIPHQIHLGELHAILRRQEDFYPFLKDNREKIEKILTFRIPYYVGPLARGNSRFAWMTRKSEETITPWNFEEVVDKGASAQSFIERMTNFDKNLPNEKVLPKHSLLYEYFTVYNELTKVKYVTEGMRKPAFLSGEQKKAIVDLLFKTNRKVTVKQLKEDYFKKIECFDSVEISGVEDRFNASLGTYHDLLKIIKDKDFLDNEENEDILEDIVLTLTLFEDREMIEERLKTYAHLFDDKVMKQLKRRRYTGWGRLSRKLINGIRDKQSGKTILDFLKSDGFANRNFMQLIHDDSLTFKEDIQKAQVSGQGDSLHEHIANLAGSPAIKKGILQTVKVVDELVKVMGRHKPENIVIEMARENQTTQKGQKNSRERMKRIEEGIKELGSQILKEHPVENTQLQNEKLYLYYLQNGRDMYVDQELDINRLSDYDVDHIVPQSFLKDDSIDNKVLTRSDKNRGKSDNVPSEEVVKKMKNYWRQLLNAKLITQRKFDNLTKAERGGLSELDKAGFIKRQLVETRQITKHVAQILDSRMNTKYDENDKLIREVKVITLKSKLVSDFRKDFQFYKVREINNYHHAHDAYLNAVVGTALIKKYPKLESEFVYGDYKVYDVRKMIAKSEQEIGKATAKYFFYSNIMNFFKTEITLANGEIRKRPLIETNGETGEIVWDKGRDFATVRKVLSMPQVNIVKKTEVQTGGFSKESILPKRNSDKLIARKKDWDPKKYGGFDSPTVAYSVLVVAKVEKGKSKKLKSVKELLGITIMERSSFEKNPIDFLEAKGYKEVKKDLIIKLPKYSLFELENGRKRMLASAGELQKGNELALPSKYVNFLYLASHYEKLKGSPEDNEQKQLFVEQHKHYLDEIIEQISEFSKRVILADANLDKVLSAYNKHRDKPIREQAENIIHLFTLTNLGAPAAFKYFDTTIDRKRYTSTKEVLDATLIHQSITGLYETRIDLSQLGGDGSGGSPKKKRKV

SEQ ID NO: 729 - DNA, 22 bp, synthetic construct
  source 1..22: mol_type = other DNA
tctttatggcagggtgaaacgc

SEQ ID NO: 730 - DNA, 22 bp, synthetic construct
  source 1..22: mol_type = other DNA
gaaatcccgaatctctatcgtg

SEQ ID NO: 731 - DNA, 22 bp, synthetic construct
  source 1..22: mol_type = other DNA
atgagcgaacgcgtaacgcgaa

SEQ ID NO: 732 - DNA, 22 bp, synthetic construct
  source 1..22: mol_type = other DNA
gccggtcgctaccattaccagt

SEQ ID NO: 733 - DNA, 20 bp, synthetic construct
  source 1..20: mol_type = other DNA
tttatggcagggtgaaacgc

SEQ ID NO: 734 - DNA, 20 bp, synthetic construct
  source 1..20: mol_type = other DNA
aatcccgaatctctatcgtg

SEQ ID NO: 735 - DNA, 20 bp, synthetic construct
  source 1..20: mol_type = other DNA
gagcgaacgcgtaacgcgaa

SEQ ID NO: 736 - DNA, 20 bp, synthetic construct
  source 1..20: mol_type = other DNA
cggtcgctaccattaccagt

SEQ ID NO: 737 - DNA, 8520 bp, synthetic construct; identical to SEQ ID NO: 484
  source 1..8520: mol_type = other DNA

SEQ ID NO: 738 - DNA, 10396 bp, synthetic construct
  source 1..10396: mol_type = other DNA
gaaataattttgtttaactttaagaaggagatataccatgggcagcagtcatcatcatcaccatcactccgaggttgaatttagtcatgaatattggatgcgccacgcgctgacgttagccaaacgtgctcgtgatgagcgcgaagttccagtcggggccgtcttggtccttaacaatcgtgtcattggcgaggggtggaaccgcgctattgggctgcacgatccaacagcgcatgctgagattatggccttgcgtcaaggagggttagtaatgcaaaactaccgtcttattgatgctacgttatactctacattcgaaccctgtgtaatgtgtgcaggagcgatgatccacagtcgtattggccgcgtagtatttggtgtacgcaatgctaaaactggagccgccggatcgttgatggatgtcttgcattaccctggaatgaaccatcgtgtagagatcactgaaggcatccttgccgatgagtgtgcggctttgctttgctatttcttccgtatgccacgtcgtgtttttaacgcccaaaaaaaggctcaatccagtaccgattcaggcgggtcgtcgggaggaagcagtggcagcgagactcccggaacttcggagagcgctacaccagaaagtagtggaggcagctctggtgggtccatggataagaaatactcaataggactggcgattggcacaaatagcgtcggatgggctgtgatcactgatgaatataaggttccttctaaaaagttcaaggttctgggaaatacagaccgccacagtatcaaaaaaaatcttataggggctcttctgtttgacagtggagagacagccgaagctactagactcaaacggacagctaggagaaggtatacaagacggaagaataggatttgttatctccaggagattttttcaaatgagatggccaaagtggatgatagtttctttcatagacttgaagagtcttttttggtggaagaagacaagaagcatgaaagacatcctatttttggaaatatagtggatgaagttgcttatcacgagaaatatccaactatctatcatctgagaaaaaaattggtggattctactgataaagccgatttgcgcctgatctatttggccctggcccacatgattaagtttagaggtcattttttgattgagggcgatctgaatcctgataatagtgatgtggacaaactgtttatccagttggtgcaaacctacaatcaactgtttgaagaaaaccctattaacgcaagtggagtggatgctaaagccattctttctgcaagattgagtaaatcaagaagactggaaaatctcattgctcagctccccggtgagaagaaaaatggcctgtttgggaatctcattgctttgtcattgggtttgacccctaattttaaatcaaattttgatttggcagaagatgctaaactccagctttcaaaagatacttacgatgatgatctggataatctgttggctcaaattggagatcaatatgctgatttgtttttggcagctaagaatctgtcagatgctattctgctttcagacatcctgagagtgaatactgaaataactaaggctcccctgtcagcttcaatgattaaacgctacgatgaacatcatcaagacttgactcttctgaaagccctggttagacaacaacttccagaaaagtataaagaaatcttttttgatcaatcaaaaaacggatatgcaggttatattgatggcggcgcaagccaagaagaattttataaatttatcaaaccaattctggaaaaaatggatggtactgaggaactgttggtgaaactgaatagagaagatttgctgcgcaagcaacggacctttgacaacggctctattccccatcaaattcacttgggtgagctgcatgctattttgagaagacaagaagacttttatccatttctgaaagacaatagagagaagattgaaaaaatcttgacttttaggattccttattatgttggtccattggccagaggcaatagtaggtttgcatggatgactcggaagtctgaagaaacaattaccccatggaattttgaagaagttgtcgataaaggtgcttcagctcaatcatttattgaacgcatgacaaactttgataaaaatcttccaaatgaaaaagtgctgccaaaacatagtttgctttatgagtattttaccgtttataacgaattgacaaaggtcaaatatgttactgaaggaatgagaaaaccagcatttctttcaggtgaacagaagaaagccattgttgatctgctcttcaaaacaaataggaaagtgaccgttaagcaactgaaagaagattatttcaaaaaaatagaatgttttgatagtgttgaaatttcaggagttgaagatagatttaatgcttcactgggtacataccatgatttgctgaaaattattaaagataaagattttttggataatgaagaaaatgaagacatcctggaggatattgttctgacattgaccctgtttgaagatagggagatgattgaggaaagacttaaaacatacgctcacctctttgatgataaggtgatgaaacagcttaaaagacgcagatatactggttggggaaggttgtccagaaaattgattaatggtattagggataagcaatctggcaaaacaatactggattttttgaaatcagatggttttgccaatcgcaattttatgcagctcatccatgatgatagtttgacatttaaagaagacatccaaaaagcacaagtgtctggacaaggcgatagtctgcatgaacatattgcaaatctggctggtagccctgctattaaaaaaggtattctccagactgtgaaagttgttgatgaattggtcaaagtgatggggcggcataagccagaaaatatcgttattgaaatggcaagagaaaatcagacaactcaaaagggccagaaaaattccagagagaggatgaaaagaatcgaagaaggtatcaaagaactgggaagtcagattcttaaagagcatcctgttgaaaatactcaattgcaaaatgaaaagctctatctctattatctccaaaatggaagagatatgtatgtggaccaagaactggatattaataggctgagtgattatgatgtcgatcacattgttccacaaagtttccttaaagacgattcaatagacaataaggtcctgaccaggtctgataaaaatagaggtaaatccgataacgttccaagtgaagaagtggtcaaaaagatgaaaaactattggagacaacttctgaacgccaagctgatcactcaaaggaagtttgataatctgaccaaagctgaaagaggaggtttgagtgaacttgataaagctggttttatcaaacgccaattggttgaaactcgccaaatcactaagcatgtggcacaaattttggatagtcgcatgaatactaaatacgatgaaaatgataaacttattagagaggttaaagtgattaccctgaaatctaaactggtttctgacttcagaaaagatttccaattctataaagtgagagagattaacaattaccatcatgcccatgatgcctatctgaatgccgtcgttggaactgctttgattaagaaatatccaaaacttgaaagcgagtttgtctatggtgattataaagtttatgatgttaggaaaatgattgctaagtctgagcaagaaataggcaaagcaaccgcaaagtatttcttttactctaatatcatgaacttcttcaaaacagaaattacacttgcaaatggagagattcgcaaacgccctctgatcgaaactaatggggaaactggagaaattgtctgggataaagggagagattttgccacagtgcgcaaagtgttgtccatgccccaagtcaatatcgtcaagaaaacagaagtgcagacaggcggattctctaaggagtcaattctgccaaaaagaaattccgacaagctgattgctaggaaaaaagactgggacccaaaaaaatatggtggttttgatagtccaaccgtggcttattcagtcctggtggttgctaaggtggaaaaagggaaatccaagaagctgaaatccgttaaagagctgctggggatcacaattatggaaagaagttcctttgaaaaaaatcccattgactttctggaagctaaaggatataaggaagttaaaaaagacctgatcattaaactgcctaaatatagtctttttgagctggaaaacggtaggaaacggatgctggctagtgccggagaactgcaaaaaggaaatgagctggctctgccaagcaaatatgtgaattttctgtatctggctagtcattatgaaaagttgaagggtagtccagaagataacgaacaaaaacaattgtttgtggagcagcataagcattatctggatgagattattgagcaaatcagtgaattttctaagagagttattctggcagatgccaatctggataaagttcttagtgcatataacaaacatagagacaaaccaataagagaacaagcagaaaatatcattcatctgtttaccttgaccaatcttggagcacccgctgcttttaaatactttgatacaacaattgataggaaaagatatacctctacaaaagaagttctggatgccactcttatccatcaatccatcactggtctttatgaaacacgcattgatttgagtcagctgggaggtgacggctctggcgggtctcccaagaagaagaggaaagtctaagatccggctgctaacaaagcccgaaaggaagctgagttggctgctgccaccgctgagcaataactagcataaccccttggggcctctaaacgggtcttgaggggttttttgctgaaaggaggaactatatccggattggcgaatgggacgcgccctgtagcggcgcattaagcgcggcgggtgtggtggttacgcgcagcgtgaccgctacacttgccagcgccctagcgcccgctcctttcgctttcttcccttcctttctcgccacgttcgccggctttccccgtcaagctctaaatcgggggctccctttagggttccgatttagtgctttacggcacctcgaccccaaaaaacttgattagggtgatggttcacgtagtgggccatcgccctgatagacggtttttcgccctttgacgttggagtccacgttctttaatagtggactcttgttccaaactggaacaacactcaaccctatctcggtctattcttttgatttataagggattttgccgatttcggcctattggttaaaaaatgagctgatttaacaaaaatttaacgcgaattttaacaaaatattaacgcttacaatttaggtggcacttttcggggaaatgtgcgcggaacccctatttgtttatttttctaaatacattcaaatatgtatccgctcatgagacaataaccctgataaatgcttcaataatattgaaaaaggaagagtatgagtattcaacatttccgtgtcgcccttattcccttttttgcggcattttgccttcctgtttttgctcacccagaaacgctggtgaaagtaaaagatgctgaagatcagttgggtgcacgagtgggttacatcgaactggatctcaacagcggtaagatccttgagagttttcgccccgaagaacgttttccaatgatgagcacttttaaagttctgctatgtggcgcggtattatcccgtattgacgccgggcaagagcaactcggtcgccgcatacactattctcagaatgacttggttgagtactcaccagtcacagaaaagcatcttacggatggcatgacagtaagagaattatgcagtgctgccataaccatgagtgataacactgcggccaacttacttctgacaacgatcggaggaccgaaggagctaaccgcttttttgcacaacatgggggatcatgtaactcgccttgatcgttgggaaccggagctgaatgaagccataccaaacgacgagcgtgacaccacgatgcctgcagcaatggcaacaacgttgcgcaaactattaactggcgaactacttactctagcttcccggcaacaattaatagactggatggaggcggataaagttgcaggaccacttctgcgctcggcccttccggctggctggtttattgctgataaatctggagccggtgagcgtgggtctcgcggtatcattgcagcactggggccagatggtaagccctcccgtatcgtagttatctacacgacggggagtcaggcaactatggatgaacgaaatagacagatcgctgagataggtgcctcactgattaagcattggtaactgtcagaccaagtttactcatatatactttagattgatttaaaacttcatttttaatttaaaaggatctaggtgaagatcctttttgataatctcatgaccaaaatcccttaacgtgagttttcgttccactgagcgtcagaccccgtagaaaagatcaaaggatcttcttgagatcctttttttctgcgcgtaatctgctgcttgcaaacaaaaaaaccaccgctaccagcggtggtttgtttgccggatcaagagctaccaactctttttccgaaggtaactggcttcagcagagcgcagataccaaatactgtccttctagtgtagccgtagttaggccaccacttcaagaactctgtagcaccgcctacatacctcgctctgctaatcctgttaccagtggctgctgccagtggcgataagtcgtgtcttaccgggttggactcaagacgatagttaccggataaggcgcagcggtcgggctgaacggggggttcgtgcacacagcccagcttggagcgaacgacctacaccgaactgagatacctacagcgtgagctatgagaaagcgccacgcttcccgaagggagaaaggcggacaggtatccggtaagcggcagggtcggaacaggagagcgcacgagggagcttccagggggaaacgcctggtatctttatagtcctgtcgggtttcgccacctctgacttgagcgtcgatttttgtgatgctcgtcaggggggcggagcctatggaaaaacgccagcaacgcggcctttttacggttcctggccttttgctggccttttgctcacatgttctttcctgcgttatcccctgattctgtggataaccgtattaccgcctttgagtgagctgataccgctcgccgcagccgaacgaccgagcgcagcgagtcagtgagcgaggaagcggaagagcgcctgatgcggtattttctccttacgcatctgtgcggtatttcacaccgcaatggtgcactctcagtacaatctgctctgatgccgcatagttaagccagtatacactccgctatcgctacgtgactgggtcatggctgcgccccgacacccgccaacacccgctgacgcgccctgacgggcttgtctgctcccggcatccgcttacagacaagctgtgaccgtctccgggagctgcatgtgtcagaggttttcaccgtcatcaccgaaacgcgcgaggcagctgcggtaaagctcatcagcgtggtcgtgaagcgattcacagatgtctgcctgttcatccgcgtccagctcgttgagtttctccagaagcgttaatgtctggcttctgataaagcgggccatgttaagggcggttttttcctgtttggtcactgatgcctccgtgtaagggggatttctgttcatgggggtaatgataccgatgaaacgagagaggatgctcacgatacgggttactgatgatgaacatgcccggttactggaacgttgtgagggtaaacaactggcggtatggatgcggcgggaccagagaaaaatcactcagggtcaatgccagcgcttcgttaatacagatgtaggtgttccacagggtagccagcagcatcctgcgatgcagatccggaacataatggtgcagggcgctgacttccgcgtttccagactttacgaaacacggaaaccgaagaccattcatgttgttgctcaggtcgcagacgttttgcagcagcagtcgcttcacgttcgctcgcgtatcggtgattcattctgctaaccagtaaggcaaccccgccagcctagccgggtcctcaacgacaggagcacgatcatgcgcacccgtggggccgccatgccggcgataatggcctgcttctcgccgaaacgtttggtggcgggaccagtgacgaaggcttgagcgagggcgtgcaagattccgaataccgcaagcgacaggccgatcatcgtcgcgctccagcgaaagcggtcctcgccgaaaatgacccagagcgctgccggcacctgtcctacgagttgcatgataaagaagacagtcataagtgcggcgacgatagtcatgccccgcgcccaccggaaggagctgactgggttgaaggctctcaagggcatcggtcgagatcccggtgcctaatgagtgagctaacttacattaattgcgttgcgctcactgcccgctttccagtcgggaaacctgtcgtgccagctgcattaatgaatcggccaacgcgcggggagaggcggtttgcgtattgggcgccagggtggtttttcttttcaccagtgagacgggcaacagctgattgcccttcaccgcctggccctgagagagttgcagcaagcggtccacgctggtttgccccagcaggcgaaaatcctgtttgatggtggttaacggcgggatataacatgagctgtcttcggtatcgtcgtatcccactaccgagatatccgcaccaacgcgcagcccggactcggtaatggcgcgcattgcgcccagcgccatctgatcgttggcaaccagcatcgcagtgggaacgatgccctcattcagcatttgcatggtttgttgaaaaccggacatggcactccagtcgccttcccgttccgctatcggctgaatttgattgcgagtgagatatttatgccagccagccagacgcagacgcgccgagacagaacttaatgggcccgctaacagcgcgatttgctggtgacccaatgcgaccagatgctccacgcccagtcgcgtaccgtcttcatgggagaaaataatactgttgatgggtgtctggtcagagacatcaagaaataacgccggaacattagtgcaggcagcttccacagcaatggcatcctggtcatccagcggatagttaatgatcagcccactgacgcgttgcgcgagaagattgtgcaccgccgctttacaggcttcgacgccgcttcgttctaccatcgacaccaccacgctggcacccagttgatcggcgcgagatttaatcgccgcgacaatttgcgacggcgcgtgcagggccagactggaggtggcaacgccaatcagcaacgactgtttgcccgccagttgttgtgccacgcggttgggaatgtaattcagctccgccatcgccgcttccactttttcccgcgttttcgcagaaacgtggctggcctggttcaccacgcgggaaacggtctgataagagacaccggcatactctgcgacatcgtataacgttactggtttcacattcaccaccctgaattgactctcttccgggcgctatcatgccataccgcgaaaggttttgcgccattcgatggtgtccgggatctcgacgctctcccttatgcgactcctgcattaggaagcagcccagtagtaggttgaggccgttgagcaccgccgccgcaaggaatggtttaattaattctcgagtgcggccgcaagcttgtcgacggagctcgaattcggatcctaatacgactcactatagtttatggcagggtgaaacgcgttttagagctagaaatagcaagttaaaataaggctagtccgttatcaacttgaaaaagtggcaccgagtcggtgcttttttgtgaacctgcaggaggcatcaaataaaacgaaaggctcagtcgaaagactgggcctttcgttttatctgttgtttgtcggtgaacgctctcctgagtaggacaaattctagagcatgcaaggagatggcgcccaacagtcccccggccacggggcctgccaccatacccacgccgaaacaagcgctcatgagcccgaagtggcgagcccgatcttccccatcggtgatgtcggcgatataggcgccagcaaccgcacctgtggcgccggtgatgccggccacgatgcgtccggcgtagaggatcgagatctcgatcccgcgaaattaatacgactcactataggggaattgtgagcggataacaattcccctctaggatcc

SEQ ID NO: 739 - protein, 1104 aa, unidentified; identical to SEQ ID NO: 587

SEQ ID NO: 740 - protein, 1723 aa, unidentified
MGSSHHHHHHMSSETGPVAVDPTLRRRIEPHEFEVFFDPRELRKETCLLYEINWGGRHSIWRHTSQNTNKHVEVNFIEKFTTERYFCPNTRCSITWFLSWSPCGECSRAITEFLSRYPHVTLFIYIARLYHHADPRNRQGLRDLISSGVTIQIMTEQESGYCWRNFVNYSPSNEAHWPRYPHLWVRLYVLELYCIILGLPPCLNILRRKQPQLTFFTIALQSCHYQRLPPHILWATGLKSGSETPGTSESATPESAMDKKYSIGLAIGTNSVGWAVITDEYKVPSKKFKVLGNTDRHSIKKNLIGALLFDSGETAEATRLKRTARRRYTRRKNRICYLQEIFSNEMAKVDDSFFHRLEESFLVEEDKKHERHPIFGNIVDEVAYHEKYPTIYHLRKKLVDSTDKADLRLIYLALAHMIKFRGHFLIEGDLNPDNSDVDKLFIQLVQTYNQLFEENPINASGVDAKAILSARLSKSRRLENLIAQLPGEKKNGLFGNLIALSLGLTPNFKSNFDLAEDAKLQLSKDTYDDDLDNLLAQIGDQYADLFLAAKNLSDAILLSDILRVNTEITKAPLSASMIKRYDEHHQDLTLLKALVRQQLPEKYKEIFFDQSKNGYAGYIDGGASQEEFYKFIKPILEKMDGTEELLVKLNREDLLRKQRTFDNGSIPHQIHLGELHAILRRQEDFYPFLKDNREKIEKILTFRIPYYVGPLARGNSRFAWMTRKSEETITPWNFEEVVDKGASAQSFIERMTNFDKNLPNEKVLPKHSLLYEYFTVYNELTKVKYVTEGMRKPAFLSGEQKKAIVDLLFKTNRKVTVKQLKEDYFKKIECFDSVEISGVEDRFNASLGTYHDLLKIIKDKDFLDNEENEDILEDIVLTLTLFEDREMIEERLKTYAHLFDDKVMKQLKRRRYTGWGRLSRKLINGIRDKQSGKTILDFLKSDGFANRNFMQLIHDDSLTFKEDIQKAQVSGQGDSLHEHIANLAGSPAIKKGILQTVKVVDELVKVMGRHKPENIVIEMARENQTTQKGQKNSRERMKRIEEGIKELGSQILKEHPVENTQLQNEKLYLYYLQNGRDMYVDQELDINRLSDYDVDHIVPQSFLKDDSIDNKVLTRSDKNRGKSDNVPSEEVVKKMKNYWRQLLNAKLITQRKFDNLTKAERGGLSELDKAGFIKRQLVETRQITKHVAQILDSRMNTKYDENDKLIREVKVITLKSKLVSDFRKDFQFYKVREINNYHHAHDAYLNAVVGTALIKKYPKLESEFVYGDYKVYDVRKMIAKSEQEIGKATAKYFFYSNIMNFFKTEITLANGEIRKRPLIETNGETGEIVWDKGRDFATVRKVLSMPQVNIVKKTEVQTGGFSKESILPKRNSDKLIARKKDWDPKKYGGFDSPTVAYSVLVVAKVEKGKSKKLKSVKELLGITIMERSSFEKNPIDFLEAKGYKEVKKDLIIKLPKYSLFELENGRKRMLASAGELQKGNELALPSKYVNFLYLASHYEKLKGSPEDNEQKQLFVEQHKHYLDEIIEQISEFSKRVILADANLDKVLSAYNKHRDKPIREQAENIIHLFTLTNLGAPAAFKYFDTTIDRKRYTSTKEVLDATLIHQSITGLYETRIDLSQLGGDGSGGSTNLSDIIEKETGKQLVIQESILMLPEEVEEVIGNKPESDILVHTAYDESTDENVMLLTSDAPEYKPWALVIQDSNGENKIKMLSGGSPKKKRKV

SEQ ID NO: 741 - DNA, 4308 bp, Homo sapiens
  source 1..4308: mol_type = genomic DNA
ccgaaacaagcgctcatgagtaatacgactcactataggggaattgtgagcggataacaattcccctctaggatccgaaataattttgtttaactttaagaaggagatatacatatgggcagcagtcatcatcatcaccatcacatggagagtaatcacaaatcaggtgatggattaagtggcacacaaaaggaagctgccttacgtgcgctggtccagcgcacgggatatagcttagtccaagaaaacgggcaacgtaagtatggtggtccgccgccgggatgggacgcggcaccgccggagagaggctgtgagatctttattggtaagttaccgcgggatttatttgaggacgagttaatacccctttgtgaaaagatcggtaagatctacgaaatgcgcatgatgatggatttcaacgggaataatcgcgggtatgctttcgtcaccttttcaaacaaggtcgaggccaagaatgccatcaagcaactcaacaactatgagatccgcaatgggagattattaggggtttgcgcatcagtcgacaactgtagattgtttgtaggcggaatcccaaagacaaagaaacgcgaggagatcctgagtgaaatgaagaaagttaccgagggagttgtcgacgtaatcgtttatccgtctgctgccgacaagacaaagaatcgcggtttcgcatttgttgagtacgagtctcaccgagccgccgcgatggcacggcgtaagttactgcctggtcgaatccaattatggggtcatggcatcgctgtggattgggccgagcctgaagttgaagtagacgaggacacgatgtcttctgtcaaaatcctgtacgtgcgcaacttaatgctgtcaactagtgaggaaatgattgagaaagaattcaataacattaagcctggggcggtcgagagagtcaagaaaatccgtgattacgctttcgtgcacttctccaatagagaggatgcagttgaggcgatgaaagcgttaaatggaaaggttctcgacggcagtccaatcgaagtgactctggcgaagccggtggacaaggactcttacgtgcgatacacacgtgggacaggcggccgtggcacgatgcttcaaggcgagtatacatactcgctgggccaagtatatgacccgactaccacgtacctgggagctccagtattctacgctccgcaaacctatgctgcgatcccaagcttacatttcccggctaccaagggccacttgagtaaccgagctatcatccgcgcgccgtcagtccgtgagatatacatgaacgtgccagtaggcgctgctggcgtgagaggattaggtggtcgaggatatcttgcctatacaggtcttggacgtgggtaccaagtgaagggcgataagcgcgaagataagttatacgacatcctgccaggcatggagctgacacccatgaaccctgttacgctcaagccccagggcataaagctcgctccacagatccttgaagagatttgccagaagaacaactggggccaacctgtctatcaactgcattctgcaatcggacaagaccaacggcagttgttcctgtacaaaatcaccattccagccctggcgagtcaaaatcctgccatacaccctttcacaccaccgaagctgagcgcctttgtggacgaggcaaagacgtacgccgctgagtatacattgcaaacactgggcattcccacggacggtggagacggcacaatggcaactgcagctgcggctgcaactgcgttccctggctatgctgtgccgaatgcaacagcccctgtgtccgccgcacaactgaaacaagcagtcacgttagggcaagacttagcagcttataccacttacgaagtttaccccactttcgctgtaacagcgcgaggggatgggtacggcaccttttgactcgagcaccaccaccaccaccactgagatccggctgctaacaaagcccgaaaggaagctgagttggctgctgccaccgctgagcaataactagcataaccccttggggcctctaaacgggtcttgaggggttttttgcttcccttcctttctcgccaaggctaggtggaggctcagtgatgataagtctgcgatggtggatgcatgtgtcatggtcatagctgtttcctgtgtgaaattgttatccgctcagagggcacaatcctattccgcgctatccgacaatctccaagacattaggtggagttcagttcggcgtatggcatatgtcgctggaaagaacatgtgagcaaaaggccagcaaaaggccaggaaccgtaaaaaggccgcgttgctggcgtttttccataggctccgcccccctgacgagcatcacaaaaatcgacgctcaagtcagaggtggcgaaacccgacaggactataaagataccaggcgtttccccctggaagctccctcgtgcgctctcctgttccgaccctgccgcttaccggatacctgtccgcctttctcccttcgggaagcgtggcgctttctcatagctcacgctgtaggtatctcagttcggtgtaggtcgttcgctccaagctgggctgtgtgcacgaaccccccgttcagcccgaccgctgcgccttatccggtaactatcgtcttgagtccaacccggtaagacacgacttatcgccactggcagcagccactggtaacaggattagcagagcgaggtatgtaggcggtgctacagagttcttgaagtggtggcctaactacggctacactagaagaacagtatttggtatctgcgctctgctgaagccagttaccttcggaaaaagagttggtagctcttgatccggcaaacaaaccaccgctggtagcggtggtttttttgtttgcaagcagcagattacgcgcagaaaaaaaggatctcaagaagatcctttgatcttttctacggggtctgacgctctattcaacaaagccgccgtcccgtcaagtcagcgtaaatgggtagggggcttcaaatcgtcctcgtgataccaattcggagcctgcttttttgtacaaacttgttgataatggcaattcaaggatcttcacctagatccttttaaattaaaaatgaagttttaaatcaatctaaagtatatatgagtaaacttggtctgacagttaccaatgcttaatcagtgaggcacctatctcagcgatctgtctatttcgttcatccatagttgcctgactccccgtcgtgtagataactacgatacgggagggcttaccatctggccccagtgctgcaatgataccgcgagagccacgctcaccggctccagatttatcagcaataaaccagccagccggaagggccgagcgcagaagtggtcctgcaactttatccgcctccatccagtctattaattgttgccgggaagctagagtaagtagttcgccagttaatagtttgcgcaacgttgttgccattgctacaggcatcgtggtgtcacgctcgtcgtttggtatggcttcattcagctccggttcccaacgatcaaggcgagttacatgatcccccatgttgtgcaaaaaagcggttagctccttcggtcctccgatcgttgtcagaagtaagttggccgcagtgttatcactcatggttatggcagcactgcataattctcttactgtcatgccatccgtaagatgcttttctgtgactggtgagtactcaaccaagtcattctgagaatagtgtatgcggcgaccgagttgctcttgcccggcgtcaatacgggataataccgcgccacatagcagaactttaaaagtgctcatcattggaaaacgttcttcggggcgaaaactctcaaggatcttaccgctgttgagatccagttcgatgtaacccactcgtgcacccaactgatcttcagcatcttttactttcaccagcgtttctgggtgagcaaaaacaggaaggcaaaatgccgcaaaaaagggaataagggcgacacggaaatgttgaatactcatactcttcctttttcaatattattgaagcatttatcagggttattgtctcatgagcggatacatatttgaatgtatttagaaaaataaacaaataggggttccgcgcacatttccccgaaaagtgccagatacctgaaacaaaacccatcgtacggccaaggaagtctccaataactgtgatccaccacaagcgccagggttttcccagtcacgacgttgtaaaacgacggccagtcatgcataatccgcacgcatctggaataaggaagtgccattccgcctgacct

SEQ ID NO: 742 - RNA, 55 nt, unidentified
  source 1..55: mol_type = other RNA
ggatatatgatacaatttgatcagtatattaaagatagttatgatttacatgatt

SEQ ID NO: 743 - DNA, 35 bp, synthetic construct
  source 1..35: mol_type = other DNA
aatcatgtaaatcataactatctttaatatactga

SEQ ID NO: 744 - protein, 275 aa, unidentified
MPAPTHASLKATLQPKRAPCPNCFATPPQILSVPQTIQPVSKTQPIKKNLTYKEITGGNIQTTTLRASLNGEFLGKFNNVTRSMAGDDLKIATGILDWMKTNGYRIGDKDKPHAEDYLIYWMSNNQDIWKKQKPDTGMNLLSMAMDKTPCIVCARNLVTFKNKFGLTLRIKAGFHFELTRRRGKPVKPYGVDYLEEQKVPIRSWPLERLSVKLKGKAKPTKTMRKRFKISAGAFALDKMVKAITRDGKLDNAIGWKTVGYSRSQSSDTESGRGWK

SEQ ID NO: 745 - protein, 309 aa, unidentified
MVGNRVAHRMAMADRNNANAELAPTAQVLSAGGAISGDNQKTIGTSAIRASDKPAPNSSALSKPFMKLMVSRDGGPVCGIRHTPSGLTQVKFPSSGRRAMAADRRLLKLHEALRRCSAPPNRVVTMVARVTPALAVGIRDLPALDRGARISGGRVLPVWMDGAGTLEIVAWNTGEASDLRRYGNRSHAEAQFFEFMRDREFKSVDIEISHSPCTACADMLAGLLKSMKAKGTTVSRGPTRRVGQRVYVGAAIETPPAIPATLRWGALFETPPQATTPQSLRELHAVGWHMAAPRTAIPNDAGTPGITLL

SEQ ID NO: 746 - protein, 210 aa, unidentified
MAADRRLLKLHEALRRCSAPPNRVVTMVARVTPALGVGIRDLPALDRGAGIPGGRVLPVWMDGAGTLEIVAWNTGEASDLRRYGNRSHAEAQFFEFMRGREFKSVDIEISHSPCTACADMLAGLLKSMKAKGTTVSRAPNRRVGQRIYVGSAIETPPTTPATLRWGALFETPPQATTPQSLRALHDVGWHMAAPRTAIPNDAGTPAITLL

SEQ ID NO: 747 - protein, 210 aa, unidentified
MAADRRLLRLQEALRRCSAQPANRVVTMVARVTPAPGVGIRDLPALDPGAGIAGGTVLPTWIAGGALEIVTWNTGEASDLRRYGNRSHAEAQFYEFMRDRDFTSIEIEISHSPCTACADMLAGLLNSMKARAASVLRGPNRRVGKRILVGSATDTARPIPATLRWGTLFETPPQATTPQSLRQLQAAGWRMAAPRTAIPNDAGTPAITLL

SEQ ID NO: 748 - protein, 210 aa, unidentified
MAVHHRLEMLSAAMRRADVPAGRTVVMAARLSPAVGIGTRDLRPLDDGARVGGGRILPISITQPNALEVVTWNTGEASDMRKVGNRSHAEAQFFEFIRDRTFDSIEIEISHSPCTACIDMLAGWLRKRMESGTTFSKPTIRKVGNRTYVGSPGRNLPNVPAVIRWGVLYDMPPQATTWQYLSDLHKAGWQLAAPGNALPGGTGSTPVHLL

SEQ ID NO: 749 - protein, 211 aa, unidentified
MADRRLPLLNRLEQVFPTRPAGRTVVLGARLTAPGPIAVGTRDLRPLEAGSPIPLAGRVAVAQRPPRPTIEVMTWNTGESRDLRYYGTLTHAERQLYECVREIAVDSVEIELSHSPCSACADILVSWLSGINAGVPAAQGPSIGMLNGRKVVRPATPGRIAARLAWAKLYDSPPQATTWAALDALHAAGWQLAAPRDALPPGEGLAPVALL

SEQ ID NO: 750 - protein, 236 aa, unidentified
MLNLLSLITCFYTLKLQLREDFSREMALTEEEFQTCFAHAAQYGNGENWPHQTILFYSLSINGNLNIAFRRVDNTPQIEHAEITMIRQIEEHIQGDSEVNHISLKVYSSYSPCNSDGSAGAKAYCADALCKFQSDLKEKSIKCEIEIRFSSFYMAHDATSESCSRNRNGLIMLIRNRIQLEVFNGEQNWKEFLRDIGKQGDELNRWVELTRVEERITREQNDVSIRDDLINQEVRE

SEQ ID NO: 751 - protein, 176 aa, unidentified
MTDHDLECFLFSGTYRDTSIPWPHKTVMVYCLTINGTPHDYQVIHSDHQNGHAEVKFINQVEISPEATEIYIEMFISYSPCDNCAKALIGWIEKLGKQGKTVSIAIKSSTFYLNETHGLISLGQVNGITFDVFCGEEAWETFFQCIRRTDFTKYKKRIRKRKDREDVDDTKLQGII

SEQ ID NO: 752 - protein, 231 aa, unidentified
MAEGSTNFMKKLLTTGIIGTDWPKTAYLIVVIKNMSGKVIWKKNYRTLPRQDSSNQHHTESQMLKDQEFKNFIEKLYSSDETKEVDSILTSNYSPCKECADDLIKFYEDKESPVRKLTIRFAHPYQTKKDKQRHLDGLKDLHRVGITLEAMTEESWRDTMMIDKSWFDAMTDAKSSFEEMMNEEHWFDKVMKLFRLDPDSVRKRDVATGGKLATLLVKTPRLKDLSTDSKL

SEQ ID NO: 753 - protein, 267 aa, unidentified
MLEKKDKNRFYKVDSQDTLTVVAVTKVTLESSGKTDSSTSFISTSFISRTNKDHKHAELLVIEETKKWLEETKKWLEEQTLTEQATTVRLTTMATKSPCSKCRPEIKKMLEEMKKKYNIVKYTLRISDFYHETINGKHEFDEDAAGILRVWKLKIEDLGVDFTLEAISVCDELRDHTPRLKKCDEHKTTEIPPTQCSKCKKLAEKTISDRSKKDLKIKGLLSQSIINEYYPQESRLTVDERTCTATASSSAQEQSSHHLYSPPSNTQ

SEQ ID NO: 754 - protein, 186 aa, unidentified
MAWRQQNQNCAWVAGEAPYVFANEYTANFISGFRTVLIAKVEGEGVGNQPFGKFFNDADGHAEANFLEALRANDWVFDAGYQEIVVSINNSPCRQCCVLFKQFMEDILLRFPNTRLVIETANIYHPNDEIDQGCLRAISRLPGIRVEMWNVALENAQNRGPQVDQQKELARINKSLRTANVVRRMP

SEQ ID NO: 755 - protein, 225 aa, unidentified
MTDTYILRWKDLFRPGTNPPVGSEAFARAPQGTTALLLVDRELTGDFKSVGSQHAEHRLLQSEQWKSALQTAAAGGVAARSEPLTIAVVINRSPCHFRAVERGHPVFLSRPAQEYFEAALAQVPGEALNEPSCGCSFKLASALVEFTKQHAVTGVKFLLACTGLYWPDDKPTVEHQGMTKKSDLAWLQLAGWDVRALEVDGNLTDRGRELIAELKAIEPWVGRRP

SEQ ID NO: 756 - protein, 201 aa, unidentified
MKVKWEDIAKYYGWDINEHKHELTTALNTTHAKIACNWIDRFPKAYSSGEHAEAKLLNEEFWQKTVPSAMQASIGSGMQALVTLIINRSPCSSCCGKLVDALDTLKRKHPFVAEENSFFLLAMRGKYKSTTDQDFASLVDAGWSLGTLEVNVEKYTDPKSKEGLSSAGIALQTALTERKVFVDGHPQRIQNISGSYWALGH

SEQ ID NO: 757 - protein, 194 aa, unidentified
MTAELNWNDLVEYFGDDLAAHRVRLSHAGWNTYGLLASRFIENDTLGVVNGEGEHAERKLVGSALWTQQLDQALAAWHPNSSPMLVLLAINRSPCADCAHLLADALHRIHNKYPLTAEKHVFLLASLGYYHSNKDEPRAPGALPKNFTTERGLRALRDAGWRLCTLSFDGQLTRRGKEFGAQLQRMSGRRSWAD

SEQ ID NO: 758 - protein, 188 aa, unidentified
MNGILNWNDAVDYFGNELEPHRKELCEASRATYGLLACRSTQGGTTRVVNADGEHAERKLIMSDIWAKDLDSALSTWDPRSTPMLILVLLNRSPCSDCSHLLAGALHQYNDRYALTTEKQHFILGSLGYYHSNKPPDEGKGQLPKTFSTDRGMRAMIDAGWKLCVIDFGPGLTRRGHELHTYLKGLTR

SEQ ID NO: 759 - protein, 163 aa, unidentified
MNSDRIYLNMCNELAKFSKCQYTNVACMMVNENGRIVASGVNGTTSGSENCCDLKFDSRDEHVKFADEEEIHAEMNAILDLARSGYSPTELSIYTNISPCPNCLKHLLGLINTKGHKLTINKIIFLEQYHRTTDLDIIKMKNRAIKHGVYLKSIKEVVEEREL

SEQ ID NO: 760 - protein, 186 aa, unidentified
MLSLNLCLSRLRGELGHIEFGATEDWCVTRFDSNDSTLEVYWSEANKPYYHTSSSQQGEGIFRPWGGHAEMQMIRDFEVTVNHYGSTPYLVEIFISRSPCSRSLAYNVAGHSYPVGCGRKILELVKQNPAVSVWKVVYDHVFSGSRNAPDVQATAQAELMINRLNQHPRVEALLWAEYHARLQQHA

SEQ ID NO: 761 - protein, 145 aa, unidentified
MKAPNAFLLGGNGRPIPGKAGTLKGTTTGVSPNQGGGHAEEYFLMKLMAFADQFYLPSEIEIYISRIPCASTSMKWNFSFKGVHMSLPAGCGAKLYAVIKTLSMVNWYIAYGEGYTGQTQSSSLAWINRIDSLPNAEAGHISKFI

SEQ ID NO: 762 - protein, 215 aa, unidentified
MYEARQRKEKVSRRIDAAGNGMTKQKKTIGIMQCLRSKVPDYDKKICYQTILYAELDGIPVGGNGIFMSTGPDAHAEVNLKQTLNKLGKNSGHLIIYLSSSPCSSTYCTRRGEGEGCQEKLEELKERGFQIEIHADHLYQPQELRQVESKNGFPSGFCSASSAMQSSVPIDFSRVPKFFMGYLEHSNTSVAQFSRIGRYSVPTDCKSVGTEYKDL

SEQ ID NO: 763 - protein, 419 aa, unidentified
MQTHHSKNKIPVSDNDNQNNKLQSVHFKDNRPESTTQLKVQQMANNAVVDAPIQRRTNNTGMPDNLKSGIEKLSGLDMSDVKVHYNSNQPAQFRAHAFAQGNQIHLASGQEKHLPHEAWHVVQQKQGRVKSTMQMRGTINVNDDVVLEKEADVMGNKALQMMYTSDQSESKVEVTNFGYSRNKRNVSTYLTKSRDNQKIIQRLRKKMRVSRAVYRKRLRSTVYLWSEFVSNLTGATTKLGLFQTSSTSHAEENLIQRINNLNLRDGTLTIHLSTSPCSSSPSHRTRCDGKTGCQERLNGLKSARNIKVEVLADHLYQPKIVAAKERKAKKGVGDTSNRGATKARFRIRFSRLPKAFHSHKRITNEDVAQFKTIEHPDDSLKLLGIEEIYIHEEKGERIIEVQGDFDKEQIDGIDAESSE

SEQ ID NO: 764 - protein, 376 aa, unidentified
MRLTENVKEIYKAMYNHSHVCRPGCSCRQPALTSTENLVLPEVKFPGKAGIAPYAARNKGGTPVTQARVVILLNDRLPAFTIQTTILGKTPHITSGIGGLGGARIPIQIRGKRQYISLPSRGERGNGGVLFLPEAGKNMIHLLTWNVGSMSLSRYGGNETHAETQFLNWIKAHLKQYPQFLNRIRAIQIFINNSPCGNCTYDLCAFARRYNLGSKIKITWKKNYNKGTDSTANFQKLKQCGIVAVSPTQSELLAEIKPQLKNLKLAKQQQHTYILDKRVHSNKLQAVNRRAERLMTNSSKPASMLSRVFASPHNYTRVKQLFQGIIDQGNYRPRPDGGYEAVRTFKFPTGWSYGKPVNRLKAIIDQKGNWHYYPVP

SEQ ID NO: 765 - protein, 184 aa, unidentified
MILHWEQLVLHYGSTLNLHRPRFEQAGQTTYGLLCCRYSPTEDELGYSAGDHAEANLLRTALWTAHLPSALRSWTPHDSCITVTLAINRSPCRNCAALLVSVLSALYRNFPARGPRNRFILAAKGAYEDAEMTTRTTQNDLRRLHDAGWELCVLQVGPTLSARGRILLEGIERVAGRGFVRLHG

SEQ ID NO: 766 - protein, 200 aa, unidentified
MNELDFSVNLHPENAAMILHWEQLMLHYGPTMGAHRPRFEAAGQTTYGLLCCRYSPMEDQLGYSSGAHAEAHLLRSAVWTTHIPNALRQWTPHDSPIIVTLALNRSPCQNCTALLIDALSALYRDFPDRGPRNRFILAAKGAYEDAGMVTCTTQNDLIRLRDAGWELCVLQVGPNLSARGQILLEGIERVAGRGFVRLHG

SEQ ID NO: 767 - protein, 207 aa, unidentified
MLLHWRQLTNYYGDELNAHLGHFHTPGQTTYGLLCCRFAQEHTRLMASQGEHSEERLLQSLLWRQIERTVQAWYSFNTDERAKAVVTLVLNRSPCHSRCVPALFDALNHLQYNFSKRFFDHWRFILACRGAYQGKVTDAGFYEHSTTTRDLQRLEDAGWQVCVLQTTTPVGNTFDLGEGLPPGGQALLQGLMNVKNVSRPSLIRLDG

SEQ ID NO: 768 - protein, 198 aa, unidentified
MILHWRQLELFYGPDVNRHRAALSQAGQTSYALLMCNWTPSGSRRMASSSGDHAEQRLLQDSIWHIELDAAFQQWTPQLNDPIVVTIAINRSPCASCADRLSDALHQLHYRYAARFPHMRFILASKGYYQGDFVGTGAGGGISRDRVTTGRGMARLKEAGWTNCVLQFGDRLSARGEELLEFLEPDLRRRHTPVRLSS

SEQ ID NO: 769 - protein, 132 aa, unidentified
MQSKLWTEQLPAALDAWTPGDAPIVVLLAINRSPCADCASVLASALHSLNDRFALRCEQQHFILASLGYYQGTGFMRDESAPHLRSIPSRAVTTHRSLQALHEAGWKHCVLDFGRGLTRRGEELYEYLRFNA

SEQ ID NO: 770 - protein, 197 aa, unidentified
MGDLSARAQHFHSMYAFDNNMSSKLMVEVEGKIRSSEHTYGSGTLVHVEDMLLHQLDVWWGYAEIPANAKIVLYGNWSPCKHCISDTIPRAFAKMKIEEKNLRLRFRFNHYYTQENWQRAGKQIRQEGGGRFFWANAEEAENAYLQLAAPYGKFATKNISTTEAVMSSTSPRVAFIQGLNRSRSITTWSEVWRDKIF

SEQ ID NO: 771 - protein, 198 aa, unidentified
MGQTSKYAEGLLDNFAYDYDMSCQLAVQYDEGKFKTSRFTYGSGPLVHVEDMLLHQLDEWWGYANIPPGSKIVLFANWSPCKHCIQNTIPNALNKMNVTDNNLRIRFRFNKYYTEQAWTGCGKTVRKEGGGHYFWESQEAADSAYDTLASIYGNCGLKNLSTTTQVITSVSPRVAFIRGQSKSRTLTTWHETWRGKIS

SEQ ID NO: 772 - protein, 362 aa, unidentified
MYHQSHVCRPGCLCRQQAATSPDSVHQEVKFPGKAGITPYAATNKAGAPVTQARIVILLNDRLPAFAIQTIILGKTPHITSGIGGLGGARVPIQTRGRRQFVSIPSKGARGNGGVLFLPESGRNVIHLLTWNVGRLSLSRNVGNETHAETQFLNWIRAHLQQYPKFLKRIRAIQILINNSPCGYCTADLCAFATKHHLGSKLKISWKRNYNKGTDSTANLQKLRQCGIVAISPGQSELLAEIKPQLKNLKLAKQQQHTYLLDKRVHSNKPQAVNRRAERLMTNSLKPTSLLSRVFASPHNYARVKQLFQGTINQGNYRQRPDGSYEAIRSFRFPTGWSYGKPVNRLKAIIDQKGNWHYYPVP

SEQ ID NO: 773 - protein, 342 aa, unidentified
MKKTTDKGFEYKTPDHLSDPIIKTGLATMGGQHGSKFGLTDPDSQGTTLLAKINGYFFGFFQAGDEWGKSLGIKNIERKTDKETVHAEEYFLAALRDTWDFLLDDGIIKKDESPSITLKITKTPCSGCAPQLVDFVSKEKDCNIRIKAAQLWGHRSNQFPHNVTALNELGKAGVTVIPWNLLSKLGKSRKSLTKHELADLSDKKFDEEDVKRLENEYNTLRESLGLEDDDLFQKRLKDYKGKGVSKETMIAILKETAPRIIESTTLKLEKMEFQLTGVNNALDKAKEPSTRKSPRKTVQAETAKSRARKINELSTKKQKKEENAEALKKTKELYQDMVVDEK

SEQ ID NO: 774 - protein, 221 aa, unidentified
MAEGGQDSAFEFMKTLLETGIDDCWPNFTNLIADIKTKDGEVIWWKKYKSRNSHAEIQMLNDVEFKDEIGKVKDDKTKKVDIILTLNYSPCSECADKLKKFYEDNKSLIQKFTIRFSRLYRINVQENKDGLKDLDRAGITLEAMTPESWFDVLMTDKSWLESMSTDQKSSFETIMKKKDKFDRVMKLFGLNHDRVKKRDADTSEGLKKLIMEEVVEKTKSL

SEQ ID NO: 775 - protein, 304 aa, unidentified
MAEGGQDLKFDFEFMKILLETGIDNCWPRFTNLIVDISDGELTWKRIYQTSDSHTESQMLDDKEFKAKFKVEEDKADKITDTEKTKKTDKAEKVDKTEMVIKAEKVGKAEKVDKTEKVDKTEKVDKTEKVDKTEKVDKTEKVDKTEKIDKPEEVDIILTSNYSPCRECAVKLIDFYEEKKSLIRNFTIRFSRLYRITEQENKDGLKDLNRAGNSAGITLEAMTEKSWFNVLMTDNSWLDSMSTQQKSSFEKMMNEKDCFDKVMKLFGLVPNKVKQRDAATSKDLTDLLAQDKKTQDSRLKQIIS

SEQ ID NO: 776 - protein, 164 aa, unidentified
MPPAGSRQDLPKRTYLIAVVKTDNGEEIYNERFKNIPNGEHAEERMLNDEDFLHAVVDHHNVKIILTSNYSPCSKCARKLISFYKKRERKIRKFIIQFPFLFKKQEEENRSGLRSLNEVGVTLRAMNADSWFKVGIDFMDVEDKERITERDKKTAYKLKQVLFT

SEQ ID NO: 777 - protein, 223 aa, unidentified
MAEGGQDLAFMKTLLQTGIDDCWPHFTNLFVVLKTEDGEVIFKKKYQTSYTYGHTEIQLLRDKEFKDEVEKVKADKTKKVFIILTSNYSPCGECADKLKEFYELEIKKSLIQGFTIRFSRLYRINKQDNKNGLKDLDIKGITLEAMTEKSWFDVLMTEKSWPDSMAVGKSSIEKMMKEKDWFDEVMKLFGLDPNKVRKRDAATSKGLDELAMEALADKVEKNL

SEQ ID NO: 778 - protein, 172 aa, unidentified
MDDELECFLFSGNYGNLNANWPHRTVMVFRSTINGTPGVYQVIHNDPQNDHAEIIFINQVNIPPEATEIEIEMFISYSPCNTCADALIVWINNLTMQVSIAIKFFSFYKNETRGLILLSQVDGITLDVFRGEEAWENFFQCIRRTDFTKYKKRIRKRKDREDVDDTKLQGII

SEQ ID NO: 779 - protein, 186 aa, unidentified
MFYFFLEQLDDDLKECFLFCGTYGDNVNFKWPRKTVMVYRLKINEELGDYKVIHNDSTNHAEIRFINEVRNSITKQHTKIDIEMFISYSPCDACAQALEGWITELRGEIPGRNVSIAIKFSNFYLEERAGLNALHKAKITLGVFNQNVWGEFFQLIKKKPDGEFQKLIDQRAARETIDASKLKGII

SEQ ID NO: 780 - protein, 178 aa, unidentified
MTDEDLNECFLFSATYGDQNDDWPHRTVMVYRLTINGELGDYKVIHSDGANHAEIHFIDEVSNSITQLHTEIKIEMFISYSPCDDCADALIDWITGLMEEVPGRNVSIAIKFSAFYLNERAGLIHLHQFPGITLGVFNTEVWTEFFQLINRNLYEFQELINQRADRETIDANMLQGII

SEQ ID NO: 781 - protein, 193 aa, unidentified
MFLSCFILILFLDQLDVDLKECFLSNGIYGVPGGGWPNRTVMVYRLKTNKKWGDCKVIRNNPANHAEIIFIDEVRNSITEKHTKIKIKMFISYSPCDKCAIQLIHWIKKLRKKKTKFSIAIKFSNFYLKHRDGLRSLHKFDKTLGVFNTEVWTEFFQLIHKNLNKFQELIDQRAARETEDARILEGIISLKRI

SEQ ID NO: 782 - protein, 236 aa, unidentified
MGRNIPHWVSRAVKRLQRERAGPTDRLLLGRPMRCVPQAWADRPARALALRRMLLPGDDGRGPAPRWLRQMAAGALGAVPRKVHLGAAAAAVDAAQTAALAPGSVLVAHVPRRGLEGATHCEARIFDRLSREPAHALEGLSPLVFYSVKCPCQDCAEKIARFATRHPSVSVEIAYEQQWVPEAYADSHGGGYSDASAVATMRAAGVSVATTEQLIWCDLVDTIEGFGVERGVSLGG

SEQ ID NO: 783 - protein, 205 aa, unidentified
MGEKTRYVFSDVETRLHLENKHPESTIMGAADVFHEGSPGGGRPLIGVYSSDTRLHAEDHLVIQLQGRYGREFFNIAEGSKVVMAMTWSPCKACVDGALTALCNHLKARRAFFKLKFLYWSTKAQRTKFRLSSSDNFFDTQAEARAKYREFMDRYPHTSHEVMDDDSRGMFLLTPRFQISPISEKPRTIGFKPFSEVEMASCMND

SEQ ID NO: 784 - protein, 427 aa, unidentified
MSQYRYVSNGPRQHRAAAHHVSPGGVSKPAVMPLQLVPAKDPCCKGDADNVKPGIAPVQGIFYWADHPHEEVDDNDNENADGITALTKKGFQKKFLTYAHGKLLDLEDIRETDIQRVFTDAFNDGKAISLGNKGANLVDPLISWFRANIKEIRKNYTLIPRAGSITGKKRKHYNPKPVRGEATGVPRRVKMKLTREFSVAEGMLHAPIFSFGGENVTKYTHVEGNGTYSIGAYAVQGGGAHLLAGSKSGENFGGSPVLKMHAEEQQIAAFEDQVAQNAHGLRDAFATGQKVVLYLHISKSPCSKQCQGIFDTLLSKYPTLEIQLYLENLYKANKPDLMKAEAIKLKALMEKYPGRLAYKIVSTENAKTALSDPQHPMKKLGGLEDIIFQSIVSNDNNASLAGTRRKNFTELIDAGHFPPESFVDSLK

SEQ ID NO: 785 - protein, 433 aa, unidentified
MTLETLRSSKYKNIFYGKGKENFDQETVAYSIVVVNDGHREEFLTTSSSGDGHAEDSFLTQVQTLLRKFQIKKIEITIMLSKSPCWKCRENLEACFESLTKKGVTVIFVLRIADLYYGKDRCEEPVVENLALWFRHIITNNIVSEYDIQPISVTTELHEYSPRLIDIAEWNATVKKRSTADRTISDTVNNIKRKIEDNLEPTPLSISNLANVIKKLVAKEKQLFYKSTSTNRHTQIFVAIAQVQLYASNTVGRTKKKEFQVIIKQTEKAGCCHLHFEGLLTERLSNEDKYEAPASWTRVSRKILLALTHFPCGNCVKKITTVIRELKPRLLVLRVANINLDERAFISDWLYQRCREGLDIRLEAISVVTELGTVYCKRGATDDEAADWKRVFKEGRPGLDVMIIDEVRRINTEISDKILFEDEAERLSKIQIN

SEQ ID NO: 786 - protein, 315 aa, unidentified; identical to SEQ ID NO: 644

SEQ ID NO: 787 - protein, 216 aa, unidentified
MYEARQNKEKVSRTLFKSLNSVCQNHKAYQTEFISKPIKSSICKNNHTFQFMTDAYNANPGSFDNLMGSFPYKSIKQALRYRTIAEAKVNGIELGMSFSNKAYGDSDHAEDAIIDTMEIIMDLYFSQPQPSKFTEIINSIRNTPTSVLEISISASPCERCRQRIKEFRDLYGFQVRIIYHHLYKDPNGATKSSNEGMQELSRAGIPSIQDKELIQR

SEQ ID NO: 788 - protein, 215 aa, unidentified; identical to SEQ ID NO: 762

SEQ ID NO: 789 - protein, 158 aa, unidentified
MINNDQIWINITNELAKFSKCQFTQVACIAVNDSGRIKATGVNGTPSGMTNCCDVKFEKREDHKQWSDDHELHAEMNMIEDLARSGRCPSKMSIYINISPCKNCLKHLIGLTKRKGSDKVEIDKIVFGKVYHRLTDDDIINMKSYCAEADVILKQVGE

SEQ ID NO: 790 - protein, 163 aa, unidentified; identical to SEQ ID NO: 759

SEQ ID NO: 791 - protein, 235 aa, unidentified
MAGRFDSRLTLLQAVPRGSVPAGRVVVLAARIMASCAIPRGSLVVPAVDESVRVRASAANPAPDAASGGLVRAGTHDQSNVLELACWNIGEPQSLNFTGNRTHAERQMVEYLKAMEAAAPGFFGSIVSIEIDINRSPCTACADSLCGLLNRIRAARPAVAAPVRMMGGRKVFSSPSAAPVPATLRWQALHAGGPQATNWAALLELSRAGWRLLSPADARPGPGSVHQGLVTVGNL

SEQ ID NO: 792 - protein, 231 aa, unidentified
MKHWHIFKQVFKKAFCSVKTYLLTHLLISLDEVCNPRYAGGTVLPPVLTKYKLSNMIDPSKTKTYLYVPAPPHGEERVYISAGETHAEDYMLAAAITPPEFWITNSPCPVCARKLMAAYADSLTKAEINIRRFYKPPPGNARAISKATDCLAKMIYQGFKLYDWDWVAFYNEYLRGGNEKCIDVLKKAANNEEKFNILRAQYVELQKVLAEAKRRSRNLDWIRNIATKCQP

SEQ ID NO: 793 - protein, 183 aa, unidentified
MILHWEQMVLHYGPEIATHRPKFEAAGQTTYGLLCCRFAPDDKQLASRDGDHAEARLLQHQNWTEHIPRALEHWEPRDSPIVVVLAINRSPCRNCSALLVTALGALHRRFPVACDQNRFILASRGIYEDARMQQATTRNDLIRLKDAGWELCVLQTGPTLPPVGNHLLDGIQDVAGRGFVRLG

SEQ ID NO: 794 - protein, 276 aa, unidentified
MWRFNANHGFHSLRCLLMCPGYFGGDVLTFSLWDSVHRKLALTDIRNMARVTYEEVRDKFIIRSQYGLWHPDRWPYGKKATIALCRVTGEDGNSLLPDDHQARIYRNLRNNHAEILLLRDLTQLLDGNDANINIEIFMNYSPCSNCATEILGFKQTMEGGGGIIKISITFANFYLTHVYANNNKTTADANKNGLLQLHKAAVGIKLLKGDKWNSLLQTQYFVDLHGNEETLLLDRAQSVQRRSRESTDMIFLNEITATEGIAEEILADLALQQLGL

SEQ ID NO: 795 - protein, 167 aa, unidentified
MFSGTYGNLNADWPDKTVMVYRLTIDNGTPGVYQVIRNDRQNGHAEIKFINQVEISPEATEIKIEMFISYSPCNKCANELIDWIKNLREQGKTVSIAIKFSTFYKDETDGLISLVEEGEIILEVFRGEEAWKTFFECIGRNFTPFVEHIRQRKEREDVDHNKLKGII

SEQ ID NO: 796 - protein, 150 aa, unidentified
MVYRLTINGELGDYKVIHSDGANHAEIHFIDEISNSITQLHTEIKIEMFISYSPCDDCADALIDWITGLMEEVPGRNVSIAIKFSAFYLNERAGLIHLHQFPGITLGVFNTEVWTEFFQLINRNLYEFQELINQRADRETIDANMLQGII

SEQ ID NO: 797 - protein, 178 aa, unidentified
MTDEDLNECFLFSATYGDQNDDWPHRTVMVYRLTINGELGDYKVIHSDGANHAEIHFIDEISNSITQLHTEIKIEMFISYSPCDDCADALIDWITGLMEEVPGRNVSIAIKFSAFYLNERAGLIHLHQFPGITLGVFNTEVWTEFFQLINRNLYEFQELINQRADRETIDANMLQGII

SEQ ID NO: 798 - protein, 186 aa, unidentified; identical to SEQ ID NO: 779

SEQ ID NO: 799 - protein, 194 aa, unidentified
MFLSCFILILFLDQLDVDLKECFLSNGIYGVPGGGWPNRTVMVYRLKTNKKWGDCKVIRNNPANHAEIIFIDEVRNSITEKHTKIKIKMFISYSPCDECAMQLIHWIKKLREKKTKFSIAIKFSNFYLKHRDGLRSLHKFEGITLGVFNTEVWTEFFQLIHKNLNKFQELINQRAARETEDARILEGIISLKRI

SEQ ID NO: 800 - protein, 170 aa, unidentified
MSNGIYGVPSGDWPNRTVMVYRLKTNKKWGDCKVIRNNPANHAEIIFIDEVRNSITEKHTKIKIKMFISYSPCDECAMQLIHWIKKLREKKTKFSIAIKFSNFYLKHRDGLRSLHKFDKTLGVLNTEVWTEFFKLIHKNLNKFQELINQRADREKEDARILDGIISLKRI

SEQ ID NO: 801 - protein, 179 aa, unidentified
MDVDLKECFLSNGIYGVPSGDWPNRTVMVYRLKTNKKWGDCKVIRNNPANHAEIIFIDEVRNSITEKHTKIKIKMFISYSPCDECAMQLIHWIKKLREKKTKFSIAIKFSNFYLKHRDGLRSLHKFDKTLGVLNTEVWTEFFKLIHKNLNKFQELINQRADREKEDARILDGIISLKRI

SEQ ID NO: 802 - protein, 208 aa, unidentified
MAATKKQAPLNDEDLKMILRCGVPGSFWPHDTVTLCIVRTKDGRVLSRKSYKCSGGDASAHTEMQFLADMENSAELDTHFREILLSGNYSPCAGCADKLCQWIEKHHSNVSLTIQFAHLYNVYVHHDAKENAQGLRKMREGGIKLRALSAYDWLQFLLLDRGFAAKDDWIAKRKQADETNSSVLKEVLDSTGDGLELDETLKKLQRLS

SEQ ID NO: 803 - protein, 235 aa, unidentified
MASQLDKEQIQLLLTTGVDRESWPHEAVVLCVLQKENNVVFRKVYENVPKSGSSDGVHAELVMLNDTAFQNHFKEGQKNIEIFLVSNYSPCGNCANKLGQFYDKNKKYLKTFTIRFSVAFRVNKEEQPIGLANLKAAGVILESMTQESWCDLLIWSLDRLPHGIREKVKVRDGREKERLDRALQEGRKALVQESHRKALPESRKSEMNRGMGNLSIQDGSSPKGAGKPGPSNERY

SEQ ID NO: 804 - protein, 227 aa, unidentified
MASQLDKEQIQFLLLTTGVDRENWPHEAVVLCVLQKENNVVFRKVYKNVPKSGSSDGVHAEIVMLNDTAFQNHFKEGQKNIEIFLVSNYSPCGNCANKLGQFYDKNKKYLKTFTIRFSVAFRVNEEEQPIGLANLEAAGVILESMTQESWCDLLIWSLDRLPHGIREKVKVRDGREKQKLDEALQEGRKALQESRESEVNRGTGNLSIQDGSFPKDAGKPGPSNERY

SEQ ID NO: 805 - protein, 168 aa, unidentified
MVLFDYAIDEEFLTTLLSTGLPDTDLPKRTYLIAVVKTDNGEEIYNERFKNIPNGEHAEERMLNDEDFLHAVVDHHNVKIILTSNYSPCSKCARKLISFYKKRERKIRKFIIQFPFLFKKQEEENRSGLRSLNEVGVTLRAMNADSWFKVGIDFMDVEDKENSDWCLG

SEQ ID NO: 806 - protein, 188 aa, unidentified
MFHIFFCFLDDFLKDLLWPTGVYGENWPKRTYLIASIKANDGKDIFNERFKNKHRQHAEKVMLRDPQFLDVVKKNRDIEITLTSNYSPCSDCADNLKKFYEKYTDNINNFTIQFSFIYHIEKYKNKTALQNLSKAGITLRAMNVESWREVGLDLAFYLNATEREKVKKRDRITARNLKNVLSEPNQDG

SEQ ID NO: 807 - protein, 164 aa, unidentified; identical to SEQ ID NO: 776

SEQ ID NO: 808 - protein, 203 aa, unidentified
MFDYATDEFLKNLLWTGVPHTVWPKRTYLIAVVKTANGKEIFKKGFKNKPKDGHAEEVMFNDYDFRNTVAGDRYIEIILTLNYSPCSECAKKLKTFYESHKKKITKFIIQFSYLYYIQKEENQSGLRNLSNAGVTLQAMNANSWREVGIKFNSMKENDKEKITKRDNNTANKLNEVLSKKQNEQGQDTSVDELSSRFNKQMKF

SEQ ID NO: 809 - protein, 206 aa, unidentified
MIIILFDCATDKFLESLLWTGVKGTVWPSHTYLITVVKDVKDGKIFNQRFENVPYKHAEEIMLDNIYFRNTVAGDRYIEIILTLNYSPCSKCAKKLQSFYESHKKKITKFIIQFSYLYYIQNKENQNGLRNLNEAGVTLQAMNPDSWDEVGIDLNVMKAKDRKRITERDKNTADELYRVLFPYKKEQVQDTSVDELSSRFNKQMKF

SEQ ID NO: 810 - protein, 201 aa, unidentified
MFDYTTDKEFLRTLLWTGIEWPKRTYLIAVVKTAYGKEIFKKGFKNKPKDGHAEEIMLNDYDFRKTVAGDRYIEIILTLNYSPCSECAKILRTFYESHKKKITKFIIQFSQLYYIQKEENQNGLRNLYEAGVTLQAMNPGSWGEVGIDLNVMGAKDRGRITERDKNTDDELYSVLFPYKKEQVQDTSVDELSSRFNKQIKF

SEQ ID NO: 811 - protein, 201 aa, unidentified
MFDYTTDKEFLRTLLWTGIEWPKRTYLIAVVKTAYGKEIFKKGFKNKPKDGHAEEIMLNDYYFRKTVAGDRYIEIILTLNYSPCSECAKILRTFYESHKKKITKFIIQFSQLYYIQKEENQNGLRNLYEAGVTLQAMNPHSWGKVGINLNATTEKDRGRITERDKKTAYQLYRVLSLYKKEQVQDTSVDELSSRFNKQIKF

SEQ ID NO: 812 - protein, 176 aa, unidentified
MKDLLWPTGVYGENWPKRTYLIASIKANDGKDIFNERFKNKHRQHAEKVMLRDPQFLDVVKKNRDIEITLTSNYSPCSDCADNLKKFYEKYTDNINNFTIQFSFIYHIEKYKNKTALQNLSKAGITLRAMNVESWREVGLDLAFYLNATEREKVKKRDRITARNLKNVLSEPNQDG

SEQ ID NO: 813 - protein, 180 aa, unidentified
MVLFDYAIDEEFLTTLLSTGLPDTDLPKRTYLIAVVKTDNGEEIYNERFKNIPNGEHAEERMLNDEDFLHAVVDHHNVKIILTSNYSPCSKCARKLISFYKKRERKIRKFIIQFPFLFKKQEEENRSGLRSLNEVGVTLRAMNADSWFKVGIDFMDVEDKERITERDKKTAYKLKQVLFT

SEQ ID NO: 814 - protein, 197 aa, unidentified
MFDFYFCALTFLFCFLDDFLNDLLWTGVKGKNRPKRTYLIASIKDNDGKDIFNERFKNTPFGKHAEKTMLCDGDFRKAVAYHHNMEIVLTLNYSPCSSCADDLKLFYETYRNIGNLTIQFSFLYNIQEEENRSGLRNLSNAGVTLQAMNANLWREVGIDLESMASEDERRISGRDKNTGDMLYAVLYRYQNEQDQDT

SEQ ID NO: 815 - protein, 265 aa, unidentified
MYIINSRIKRLVLLGTRMLQIVYCVFYLHSFLSGSVTFLEFDLRIYPYFYILMIILFSFFFVLFCFLDDFLNELLWTGVRDTKLPNRTYLIASIKSKDGEDIFNKRFKNEPFLKHAEAVMLCDDDFGDAVAVHHDIEITLTLNYSPCSSCACELKKFYEKNRNIRNPIIQFSFLYRIEEEKNQHGLRNLREAGITLQAMNANSWREVGIDLELMALEDKEIITERDEDQADMLNKVLSTYESEHDQDTSNDDELSSLFQSQLKFL

SEQ ID NO: 816 - protein, 215 aa, unidentified
MAEGGNSKDVILKEWLSTGINSKYTGSEWTSVTHLVVYIKDNDGTGIYAKYFRNNKDNHAEINMIKHSEFEKMVRKGKVDITVNSNYSPCSDCASSLITFYGKYKEYINSFTIRFAFLYFINKTKNRDGLKNLKEAGIILEAMTEKSWFEVFMLFKFSSTLADQVRKKDEDTRATLSKLLNEVPETGQVAGAGEEPGIEELTQKTKTVEVTAKNT

SEQ ID NO: 817 - protein, 250 aa, unidentified
MKGLIECLLFCVSAWSRILACREILTTGSGSNWPHSTALCCFIYKTYKNKKDGQNQIFQKIYQNEPQEQHAEEKMLAIEPDSDFISTIKDKNAVHDIVLVLSYSPCYSCANKLIVFYEKYKNPYSISSFKIRFSQLYKIYGRIPKEEKEKNKKGLKDMLLAGITLETMTDKHWFDLFSRMVFGVNPDSCRIRDNSMERKLDTLKKEAEAAAEVDVDTDADRASDADADTEEEEDLQTMMHTMVLTDEADG

SEQ ID NO: 818 - protein, 216 aa, unidentified
MAELEESKDFIKNLITTGIRDTDWPKKTYLIVVGKNKTGKVIWKKKYQTLPNKFGSLPNENHTERQMLDDQEFEDQVETGEVRKIILTSNYSPCKECAKGLINFFQERTELELTIRFSHLYEERRVNHLEGLKDLDREERITLEAMTEKSWLDVLTNEEHFLDMVLTFMFDLNPCKVEQRDVATAKKLKKLLKSDSGFELGIVDKMRRMPFESDSD

SEQ ID NO: 819 - protein, 211 aa, unidentified
MATTLEESKDFIENLFTTGIKGTVWPKKTYLIVVIKNRRGEVIFRKKYQTLPNRCGFLPNENHTERQMLDDQEFKECLETGEVCEIILTSNYSPCKDCAKDLKNFYEECTELRLTIQFSHPYETNDGKDHLKGLKNLDRAGITLEAMTDESRLDVLRNEEHLLDMVLKFMFDLDPRRVEERDVATKEKLKKLRRTDSEAERFAAKMKNLNL

SEQ ID NO: 820 - protein, 194 aa, unidentified
MAEREDLNFIEILLKTGTDDCWPDDTYLIVLILNMIGEVIWKNKYQTSDEHPEIQMLKDDGFKDKVKKRKAGAAEKVTIILTSNHSPCYKCADELITFFNGRKSLKDKFIIQFSRPFRTDEELNQNGLRNLDMAGIILEGMTSKCWFSVMIQYMFDLEPDKVSKRDYDTRERLDELLADDSEDSEDDSEDSESD

SEQ ID NO: 821 - protein, 238 aa, unidentified
MAEGGEDVPFVRALLDTGIDGYKPKFTNLIVFIKNTDGTVIWKDKYQTSESHVHAEIQMLIDKEFKDKVEKGKADKTEKVDIILTSNYSPCWECALELKKFYKGKKHLIRKFTIRFSRLYKREEYDNEICLRDLKSKGITLEAMTEESWFDVLMIQKPRFDSMKNAKYSFEEMMNEDDWFDKVMEHFYLDPVKVKKRDVDTRKKLEKLLRQVSSESSDSEAERLANDLKNLKVEGGSD

SEQ ID NO: 822 - protein, 238 aa, unidentified; identical to SEQ ID NO: 821

SEQ ID NO: 823 - protein, 184 aa, unidentified
MAFMKILLKTGIDGYWPKFTNLIVVIKTEDGEVIWTKTYQTSKSHVHTEIQMLTDKKFKDEVEKVKADKTKKVVIILTSNYSPCRECADKLKEFYEDKKSLIQGFTIRFSRLYRINEQDNKNGLKDLYIKGITLEAMTEKSWFDQVMKLFDLDPDKVRKRDADTSKGLKELEIEALADKVEKNL

SEQ ID NO: 824 - protein, 304 aa, unidentified
MAEGGQDLKFDFEFMKILLETGIDNCWPRFTNLIVDISDGELTWKRIYQTSDSHTESQMLDDKEFKAKFKVEEDKADKITDTEKTKKTDKAEKVDKTEMVIKAEKVGKAEKVDKTEKVDKTEKVDKTEKVDKTEKVDKTEKVDQTEKIDKPEEVDIILTSNYSPCRECAVKLIDFYEEKKSLIRNFTIRFSRLYRITEQENKDGLKDLNSAGNSAGITLEAMTEKSWFNVLMTDKSWLDSMSTQQKSSFEKMMNEKDCFDKVMKLFGLVPNKVKQRDAATSKDLTDLLAQDKKTQDSRLKQIIS

SEQ ID NO: 825 - protein, 331 aa, unidentified
MAEGGQDLKFDFEFMKILLETGIDNCWPRFTNLIVDISDGELTWKRIYQTSDSHTESQMLDDKEFKAKFKVEEDKADKITDTEKTKKTDKAEKVYKTEMVIKAEKVGKAEKVDKTEKVDKTEKVDKTEKVDKTEKVDKTEKVDKTENVDKTEKVDKTENVDKAEKIDKPEEVDIILTSNYSPCRECAVKLIDFYEEKKGLIRNFIIRFSRLYRITEQENKDGLKDLNRAGNSAGITLEAMTEKSWCDVLMTDKSWLDSMSTQQKSSFEKMMNEKDCFDKVMKLFGLVPNKVKQRDAATSKDLTDLLAQDKKTQDSRLKQIISSKTRHRHKK

SEQ ID NO: 826 - protein, 257 aa, unidentified
MAEGGQDLAFEFMKILLKTGIGKCWPKFTNLIADIKTKDGEVTWRKKYQTSKSHKHAEFQMLNDKEFKDEIGKVKADKTKRTEKTNKTEKTNKTEKTEKVDIILTLNYSPCGECADELVEFYKDKRSLIRKFTIRFSRLFRINIQANIDGLKDLNSAGITLKAMTEKSWYDVLMPEESSGFEEVMELYDLDPVMIRKRDLDTRKTLQELLGKDQSDSSDESGSSHESGPSHESESSDSDAQLLVSDMEKLKFESDSD

SEQ ID NO: 827 - protein, 257 aa, unidentified
MAEGGQDLAFEFMKILLKTGSGNCWPKSTKLIVDIKTKNGEITRRKKYQTSKSHKHAEFQMLNDKVFKDEIEKVKDDKTKKTEKTKTTDKTEKVDIILTLNYSPCSECADKLIEFYKDKRSLIRKFTIRFSRLFRINIQANIDGLKDLNSAGITLKAMTEKSWCDVLMPEESSSFEKVMKLYDLDPVMIRKRDLDTRKTLQELLGKDQSDSSDESGSSHESGPSHESESSDSDAQILVSDMEKINLKAILTDKSVYS

SEQ ID NO: 828 - protein, 165 aa, unidentified
MRRETCLLYEIQWGTSHRRWRKSGKNTTNHAEVNFIEKLTSERQFCPSVRCSITWFLSWSPCWECSQAIQEFLSQHPNVTLVIYVARLYYHMDQRNRQGLRDLVNSGVTIQIMSVPGKKQRPRLLSVYNRQQCPRQEVSEVKVKLMGEGTRSNIPSNESVSNSFI

SEQ ID NO: 829 - protein, 137 aa, unidentified
MRQFIFWGLLPYPSSPLHVACSRMIPSLHQYYSRTCLHAEQCFLYWFHEHMLDPAEDYQVTWYISWSPCSTCADEMASFLATHRNVSLTIFSARLYYFWNSAYQNGLRKLYQEGAQVKVMTFQGERWWEVRATKRLG

SEQ ID NO: 830 - protein, 227 aa, unidentified
MWNTVLNHGYGYSELGGSLASETYLVCKMDGEPKPIIKGNNIEKHAEMQLVDDLKQMELLQKKVTVYINNSPCAACAKKLKDYLEENEGIHLTLYVTHLYNIRRMSCQLRVNALEKERHIYYCEEHEANYQGLKDLMSLGGNRCEIKAFTVDVWRELHEVMGLTTDDYQQRMKKYNTMIQDPTQDPKNKKNHDRSRKREDINIKNDLNHLKENVDPWNGIRKIFLKR

SEQ ID NO: 831 - protein, 222 aa, unidentified
MSNIHLFFWGFFCIDKKENGNVIQHIYNTGLDHDDWSEAMDTFLVCKINGVHNPKIIRNSENHAEQLLIRHLRKKYKEKKMALKLTVYINNSPCSMCAKALENFLNKNKNVKLTFYVTNMYHIKRNSCFKARHFEHLNSIPKKSHKANSEGLRDLLRHKRCNIKAFNMGVWKELLNTVDVLPKLKTKLIGGYNRIQHANKRSRGYEDDLIKKDLMYLKSYKK

SEQ ID NO: 832 - protein, 249 aa, unidentified
MAKGGVESGEELFENLDKSGNKEKLDTMWNTVLNHGYGYSELGGSLAKTTYLVCKIDGVPEPIIIGNDEGKHAEKQLVDILKEMTLLKNEVTVYINNSPCAACANEFKDYLEENEDIHLTLYVTHLYNIRRRSCQDKADTQNERHMKTIDKDEHVDNYKGLRDLMNLEDNRCKIEAFTEDVWRQLHEVMGLTEDCQQRMITYAETKITDPKNKEKNHDRSRKTEDINIKNDLIHLQKNVDPWHGIKKYY

SEQ ID NO: 833 - protein, 267 aa, unidentified
MTDKFAPLPLIKMESVPSPGDRSTDSYQTDNSDEDDASDCDFESCERFSYTPYKVNDIIHKMWDTVLDHNNGYQQNLASSTYLVYKIEGMHKPGILKNDTMHAEKQLISIIQGNFTAPLKIIIYIYINNSPCAECATLLKKFMVDNQKIKMVLYIAHLYNIKRSSCVLRAALKKESRHVDCIPKAFHEKNYLGLRNLMSIGGHRCRIEAFKKKVWEDLLALTGISTQMMDNYNRRKKGYDRSRQNEDKRIKKDLNEIKRKPKPPYMY

SEQ ID NO: 834 - protein, 306 aa, unidentified
MAFWRTKKWSYMYRKHNSSIPDEMDVCSMFDSSDESDSSDESDSSDEADSSDESDSSDEADSSDECDSSEESDSADKSKTGYKRIKSKHPRRTYNVEDKKENGNIIQHIYNTGLDHDDWSEAMDTFLVCKINGVHNPKIMRNNSENHAEQLLIQNLRKKYKEKKMPFKLTVYINNSPCSMCAKALENFLNKNKNVKLTFYVTNMYHIKRNSCLKARHFEHLNSIPKKSHKANSEGLRDLLRHKRCNIKAFNMGVWKELLNTVDVLSKVKTKLIGGYNRIQYANKRSRGYEDDLIKKDLTYLKSYKK

SEQ ID NO: 835 - protein, 211 aa, unidentified
MPGEIEIEHHDSKIRHMYETVLDHRHGWNKAMTTNLICRINSEDTPLIIQNAHGNKHAEELLLDELNQRDKSLLTTITIYTNNSPCSNKGHDCARQLIKFLNENTHVIMVFYVTNLYKIRRVSCKSEEHYSLVSQADFKANNTGLKDMMKHGRCVVSAFSYAVWVELLNIAPVSEVFKSQLLARYRTILDTNDRSREEEDNRIRSDLAYIR

SEQ ID NO: 836 - protein, 972 aa, unidentified; identical to SEQ ID NO: 676

SEQ ID NO: 837 - protein, 972 aa, unidentified
MTDSQNDTDEYWRGEALKLAQKAWDEGEVPVGAILVRKGEVIGHGWNRSIGSHDPSAHAEIMAIREAGVRIGNYRMLDTVLYVTLEPCAMCAGALVHGRISRLVFGAENPKTGACGSVMDIARHPALNHQLQVDGGVMAAPCARLLSDFFRWRRAQKKAARDNSSGNGTSGGSSGGSSGSETPGTSESATPESSGGSSGGSMERELVLGIAYGGKYTGLAVVDRRHNQVLYANRLKMRDDVAGILKDRRKQRGIRRTAQTKKKRLRELKNYLKSIGYNESTATFETVYSLAHKRGYDYADMPEEKTSEEIEAMDVEERKQWEKEKQEWEETKRNSRHRKEVVKDVHKAMIEGRATEEQIKRVERIFNKQYRPKRFNNRILTKCKVEDCGVNTPLRKNVRDLLIENIVRFFPIEQSEKDNLKDAVLDKNRREEVKSFFRKHKTDEHIRKQVYDIADNKLSGRTVFCKEHILEHTEHSKEERKVFRLAPSLKTKIENVLAVIKDEILPKFTVNKVVMESNNFDIAAKTQGKKRLAKEEYGKGPREGKETRKEALLRETDGRCIYCGKSIDISNAHDDHIFPRKAGGLNIFANLVACCAVCNENKKGRTPLESGISPKPEIIAFMKNDLKKKILEDARNINTVDFNKYMSHASIGWRYMRDRLRESAGNKKLPIERQSGIYTAYFRRWWGFKKERGNTLHHALDAVILASRKGYSDDGLVDMTLKPKYNKGGEFDPEKHLPEPIEFKMDKGSRGSALHDRNPLSYKKGIITRRFMVTEIECGKEDDVISETYREKLKEAFKRFDTKKGKCLTDKEAKEAGFCIKKNELVMSLKCSIKGTGPGQMIRINNNVFKTNVHNVGVDVYLDEKGKKKAYERKNPRLSKHFIEPPPQPNGRVSFTLKRRDMVTVEGEDAIYRIKKLGTSPTIEAVVGSDGKTRTVSATKLTKANSAELEEGADKRTADGSEFESPKKKRKV

SEQ ID NO: 838 - protein, 972 aa, unidentified
MTDSQNDTDEYWMGEALKLAQKAWDEGEVPVGAILVRKGEVIGHDWNRSIGSHDPSAHAEIMAIREAGVRIGNYRMLDTVLYVTLEPCAMCAGALVHGRISRLVFGAENPKTGACGSVMDIARHPALNHQLQVDGGVMAAPCARLLSDFFRWRRAQKKAARDNSSGNGTSGGSSGGSSGSETPGTSESATPESSGGSSGGSMERELVLGIAYGGKYTGLAVVDRRHNQVLYANRLKMRDDVAGILKDRRKQRGIRRTAQTKKKRLRELKNYLKSIGYNESTATFETVYSLAHKRGYDYADMPEEKTSEEIEAMDVEERKQWEKEKQEWEETKRNSRHRKEVVKDVHKAMIEGRATEEQIKRVERIFNKQYRPKRFNNRILTKCKVEDCGVNTPLRKNVRDLLIENIVRFFPIEQSEKDNLKDAVLDKNRREEVKSFFRKHKTDEHIRKQVYDIADNKLSGRTVFCKEHILEHTEHSKEERKVFRLAPSLKTKIENVLAVIKDEILPKFTVNKVVMESNNFDIAAKTQGKKRLAKEEYGKGPREGKETRKEALLRETDGRCIYCGKSIDISNAHDDHIFPRKAGGLNIFANLVACCAVCNENKKGRTPLESGISPKPEIIAFMKNDLKKKILEDARNINTVDFNKYMSHASIGWRYMRDRLRESAGNKKLPIERQSGIYTAYFRRWWGFKKERGNTLHHALDAVILASRKGYSDDGLVDMTLKPKYNKGGEFDPEKHLPEPIEFKMDKGSRGSALHDRNPLSYKKGIITRRFMVTEIECGKEDDVISETYREKLKEAFKRFDTKKGKCLTDKEAKEAGFCIKKNELVMSLKCSIKGTGPGQMIRINNNVFKTNVHNVGVDVYLDEKGKKKAYERKNPRLSKHFIEPPPQPNGRVSFTLKRRDMVTVEGEDAIYRIKKLGTSPTIEAVVGSDGKTRTVSATKLTKANSAELEEGADKRTADGSEFESPKKKRKV

SEQ ID NO: 839 - protein, 972 aa, unidentified
MTDSQNDTDEYWMGEALKLAQKAWDEGEVPVGAILVRKGEVIGHGWNRSIGSHDPSAHAEIMAIREAGVRIGNYRMLDTVLYVTLEPCAMCAGALVHGRISRLVFGAENPKTGACGSVMDIARHPDLNHQLQVDGGVMAAPCARLLSDFFRWRRAQKKAARDNSSGNGTSGGSSGGSSGSETPGTSESATPESSGGSSGGSMERELVLGIAYGGKYTGLAVVDRRHNQVLYANRLKMRDDVAGILKDRRKQRGIRRTAQTKKKRLRELKNYLKSIGYNESTATFETVYSLAHKRGYDYADMPEEKTSEEIEAMDVEERKQWEKEKQEWEETKRNSRHRKEVVKDVHKAMIEGRATEEQIKRVERIFNKQYRPKRFNNRILTKCKVEDCGVNTPLRKNVRDLLIENIVRFFPIEQSEKDNLKDAVLDKNRREEVKSFFRKHKTDEHIRKQVYDIADNKLSGRTVFCKEHILEHTEHSKEERKVFRLAPSLKTKIENVLAVIKDEILPKFTVNKVVMESNNFDIAAKTQGKKRLAKEEYGKGPREGKETRKEALLRETDGRCIYCGKSIDISNAHDDHIFPRKAGGLNIFANLVACCAVCNENKKGRTPLESGISPKPEIIAFMKNDLKKKILEDARNINTVDFNKYMSHASIGWRYMRDRLRESAGNKKLPIERQSGIYTAYFRRWWGFKKERGNTLHHALDAVILASRKGYSDDGLVDMTLKPKYNKGGEFDPEKHLPEPIEFKMDKGSRGSALHDRNPLSYKKGIITRRFMVTEIECGKEDDVISETYREKLKEAFKRFDTKKGKCLTDKEAKEAGFCIKKNELVMSLKCSIKGTGPGQMIRINNNVFKTNVHNVGVDVYLDEKGKKKAYERKNPRLSKHFIEPPPQPNGRVSFTLKRRDMVTVEGEDAIYRIKKLGTSPTIEAVVGSDGKTRTVSATKLTKANSAELEEGADKRTADGSEFESPKKKRKV

SEQ ID NO: 840 - protein, 972 aa, unidentified
MTDSQNDTDEYWMGEALKLAQKAWDEGEVPVGAILVRKGEVIGHGWNRSIGSHDPSAHAEIMAIREAGVRIGNYRMLDTVLYVTLEPCAMCAGALVHGRISRLVFGVENPKTGACGSVMDIARHPALNHQLQVDGGVMAAPCARLLSDFFRWRRAQKKAARDNSSGNGTSGGSSGGSSGSETPGTSESATPESSGGSSGGSMERELVLGIAYGGKYTGLAVVDRRHNQVLYANRLKMRDDVAGILKDRRKQRGIRRTAQTKKKRLRELKNYLKSIGYNESTATFETVYSLAHKRGYDYADMPEEKTSEEIEAMDVEERKQWEKEKQEWEETKRNSRHRKEVVKDVHKAMIEGRATEEQIKRVERIFNKQYRPKRFNNRILTKCKVEDCGVNTPLRKNVRDLLIENIVRFFPIEQSEKDNLKDAVLDKNRREEVKSFFRKHKTDEHIRKQVYDIADNKLSGRTVFCKEHILEHTEHSKEERKVFRLAPSLKTKIENVLAVIKDEILPKFTVNKVVMESNNFDIAAKTQGKKRLAKEEYGKGPREGKETRKEALLRETDGRCIYCGKSIDISNAHDDHIFPRKAGGLNIFANLVACCAVCNENKKGRTPLESGISPKPEIIAFMKNDLKKKILEDARNINTVDFNKYMSHASIGWRYMRDRLRESAGNKKLPIERQSGIYTAYFRRWWGFKKERGNTLHHALDAVILASRKGYSDDGLVDMTLKPKYNKGGEFDPEKHLPEPIEFKMDKGSRGSALHDRNPLSYKKGIITRRFMVTEIECGKEDDVISETYREKLKEAFKRFDTKKGKCLTDKEAKEAGFCIKKNELVMSLKCSIKGTGPGQMIRINNNVFKTNVHNVGVDVYLDEKGKKKAYERKNPRLSKHFIEPPPQPNGRVSFTLKRRDMVTVEGEDAIYRIKKLGTSPTIEAVVGSDGKTRTVSATKLTKANSAELEEGADKRTADGSEFESPKKKRKV

SEQ ID NO: 841 - protein, 972 aa, unidentified
MTDSQNDTDEYWMGEALKLAQKAWDEGEVPVGAILVRKGEVIGHGWNRSIVSHDPSAHAEIMAIREAGVRIGNYHMLDTVLYVTLEPCAMCAGALVHGRISRLVFGAENHKTGACGSVMDIARHPALNHQLQVDGGVMAAPCARLLSDFFRWRRAQKKAARDNSSGNGTSGGSSGGSSGSETPGTSESATPESSGGSSGGSMERELVLGIAYGGKYTGLAVVDRRHNQVLYANRLKMRDDVAGILKDRRKQRGIRRTAQTKKKRLRELKNYLKSIGYNESTATFETVYSLAHKRGYDYADMPEEKTSEEIEAMDVEERKQWEKEKQEWEETKRNSRHRKEVVKDVHKAMIEGRATEEQIKRVERIFNKQYRPKRFNNRILTKCKVEDCGVNTPLRKNVRDLLIENIVRFFPIEQSEKDNLKDAVLDKNRREEVKSFFRKHKTDEHIRKQVYDIADNKLSGRTVFCKEHILEHTEHSKEERKVFRLAPSLKTKIENVLAVIKDEILPKFTVNKVVMESNNFDIAAKTQGKKRLAKEEYGKGPREGKETRKEALLRETDGRCIYCGKSIDISNAHDDHIFPRKAGGLNIFANLVACCAVCNENKKGRTPLESGISPKPEIIAFMKNDLKKKILEDARNINTVDFNKYMSHASIGWRYMRDRLRESAGNKKLPIERQSGIYTAYFRRWWGFKKERGNTLHHALDAVILASRKGYSDDGLVDMTLKPKYNKGGEFDPEKHLPEPIEFKMDKGSRGSALHDRNPLSYKKGIITRRFMVTEIECGKEDDVISETYREKLKEAFKRFDTKKGKCLTDKEAKEAGFCIKKNELVMSLKCSIKGTGPGQMIRINNNVFKTNVHNVGVDVYLDEKGKKKAYERKNPRLSKHFIEPPPQPNGRVSFTLKRRDMVTVEGEDAIYRIKKLGTSPTIEAVVGSDGKTRTVSATKLTKANSAELEEGADKRTADGSEFESPKKKRKV

SEQ ID NO: 842 - protein, 972 aa, unidentified
MTDSQNDTDEYWMGEALKLAQKAWDEGEVPVGAILVREGEVIGHGWNRSIGSHDPSAHAEIMAIREAGVRIGNYRMLDTVLYVTLEPCAMCAGALVHGRISRLVFGAENPKTGACGSVMDIARHPALNHQLQVDGGVMAAPCARLLSDFFRWRRAQKKAARDNSSGNGTSGGSSGGSSGSETPGTSESATPESSGGSSGGSMERELVLGIAYGGKYTGLAVVDRRHNQVLYANRLKMRDDVAGILKDRRKQRGIRRTAQTKKKRLRELKNYLKSIGYNESTATFETVYSLAHKRGYDYADMPEEKTSEEIEAMDVEERKQWEKEKQEWEETKRNSRHRKEVVKDVHKAMIEGRATEEQIKRVERIFNKQYRPKRFNNRILTKCKVEDCGVNTPLRKNVRDLLIENIVRFFPIEQSEKDNLKDAVLDKNRREEVKSFFRKHKTDEHIRKQVYDIADNKLSGRTVFCKEHILEHTEHSKEERKVFRLAPSLKTKIENVLAVIKDEILPKFTVNKVVMESNNFDIAAKTQGKKRLAKEEYGKGPREGKETRKEALLRETDGRCIYCGKSIDISNAHDDHIFPRKAGGLNIFANLVACCAVCNENKKGRTPLESGISPKPEIIAFMKNDLKKKILEDARNINTVDFNKYMSHASIGWRYMRDRLRESAGNKKLPIERQSGIYTAYFRRWWGFKKERGNTLHHALDAVILASRKGYSDDGLVDMTLKPKYNKGGEFDPEKHLPEPIEFKMDKGSRGSALHDRNPLSYKKGIITRRFMVTEIECGKEDDVISETYREKLKEAFKRFDTKKGKCLTDKEAKEAGFCIKKNELVMSLKCSIKGTGPGQMIRINNNVFKTNVHNVGVDVYLDEKGKKKAYERKNPRLSKHFIEPPPQPNGRVSFTLKRRDMVTVEGEDAIYRIKKLGTSPTIEAVVGSDGKTRTVSATKLTKANSAELEEGADKRTADGSEFESPKKKRKV

SEQ ID NO: 843 - protein, 972 aa, unidentified
MTDSQNGTDGYWMGEALKLAQKAWDEGEVPVGAILVRKGEVIGHGWNRSIGSHDPSAHAEIMAIREAGVRIGNYRMLDTVLYVTLEPCAMCAGALVHGRISRLVFGAENPKTGACGSVMDIARHPALNHQLQVDGGVMAAPCARLLSDFFRWRRAQKKAARDNSSGNGTSGGSSGGSSGSETPGTSESATPESSGGSSGGSMERELVLGIAYGGKYTGLAVVDRRHNQVLYANRLKMRDDVAGILKDRRKQRGIRRTAQTKKKRLRELKNYLKSIGYNESTATFETVYSLAHKRGYDYADMPEEKTSEEIEAMDVEERKQWEKEKQEWEETKRNSRHRKEVVKDVHKAMIEGRATEEQIKRVERIFNKQYRPKRFNNRILTKCKVEDCGVNTPLRKNVRDLLIENIVRFFPIEQSEKDNLKDAVLDKNRREEVKSFFRKHKTDEHIRKQVYDIADNKLSGRTVFCKEHILEHTEHSKEERKVFRLAPSLKTKIENVLAVIKDEILPKFTVNKVVMESNNFDIAAKTQGKKRLAKEEYGKGPREGKETRKEALLRETDGRCIYCGKSIDISNAHDDHIFPRKAGGLNIFANLVACCAVCNENKKGRTPLESGISPKPEIIAFMKNDLKKKILEDARNINTVDFNKYMSHASIGWRYMRDRLRESAGNKKLPIERQSGIYTAYFRRWWGFKKERGNTLHHALDAVILASRKGYSDDGLVDMTLKPKYNKGGEFDPEKHLPEPIEFKMDKGSRGSALHDRNPLSYKKGIITRRFMVTEIECGKEDDVISETYREKLKEAFKRFDTKKGKCLTDKEAKEAGFCIKKNELVMSLKCSIKGTGPGQMIRINNNVFKTNVHNVGVDVYLDEKGKKKAYERKNPRLSKHFIEPPPQPNGRVSFTLKRRDMVTVEGEDAIYRIKKLGTSPTIEAVVGSDGKTRTVSATKLTKANSAELEEGADKRTADGSEFESPKKKRKV

SEQ ID NO: 844 - protein, 972 aa, unidentified
MTDSQNDTDEYWMGEALKLAQKAWDEGEVPVGAILVRKGEVIGHGWNRSIGSHDPSAHAEIMAIREAGVRIGNYRMLDTVLYVTLEPCAMCAGALVHGRISRLVFGAENPKTGACGSVMDIARHPALNHQLQVDGGVMAAPCARLLSDFPRWRRAQKKAARDNSSGNGTSGGSSGGSSGSETPGTSESATPESSGGSSGGSMERELVLGIAYGGKYTGLAVVDRRHNQVLYANRLKMRDDVAGILKDRRKQRGIRRTAQTKKKRLRELKNYLKSIGYNESTATFETVYSLAHKRGYDYADMPEEKTSEEIEAMDVEERKQWEKEKQEWEETKRNSRHRKEVVKDVHKAMIEGRATEEQIKRVERIFNKQYRPKRFNNRILTKCKVEDCGVNTPLRKNVRDLLIENIVRFFPIEQSEKDNLKDAVLDKNRREEVKSFFRKHKTDEHIRKQVYDIADNKLSGRTVFCKEHILEHTEHSKEERKVFRLAPSLKTKIENVLAVIKDEILPKFTVNKVVMESNNFDIAAKTQGKKRLAKEEYGKGPREGKETRKEALLRETDGRCIYCGKSIDISNAHDDHIFPRKAGGLNIFANLVACCAVCNENKKGRTPLESGISPKPEIIAFMKNDLKKKILEDARNINTVDFNKYMSHASIGWRYMRDRLRESAGNKKLPIERQSGIYTAYFRRWWGFKKERGNTLHHALDAVILASRKGYSDDGLVDMTLKPKYNKGGEFDPEKHLPEPIEFKMDKGSRGSALHDRNPLSYKKGIITRRFMVTEIECGKEDDVISETYREKLKEAFKRFDTKKGKCLTDKEAKEAGFCIKKNELVMSLKCSIKGTGPGQMIRINNNVFKTNVHNVGVDVYLDEKGKKKAYERKNPRLSKHFIEPPPQPNGRVSFTLKRRDMVTVEGEDAIYRIKKLGTSPTIEAVVGSDGKTRTVSATKLTKANSAELEEGADKRTADGSEFESPKKKRKV

SEQ ID NO: 845 - protein, 972 aa, unidentified
MTDSQNDTDEYWMGEALKLAQKAWDEGEVPVGAILVRKGEVIGHGWNRSIGSHDPSAHAEIMAIREAGVRIGNYRMLDTVLYVTLEPCAMCAGALVHGRISRLVFGAENPKTGACGSVMDIARHPALNHQLQVDGGVMAAPCARLLSDFFRWRRAQKKAARDNSLGNGTSGGSSGGSSGSETPGTSESATPESSGGSSGGSMERELVLGIAYGGKYTGLAVVDRRHNQVLYANRLKMRDDVAGILKDRRKQRGIRRTAQTKKKRLRELKNYLKSIGYNESTATFETVYSLAHKRGYDYADMPEEKTSEEIEAMDVEERKQWEKEKQEWEETKRNSRHRKEVVKDVHKAMIEGRATEEQIKRVERIFNKQYRPKRFNNRILTKCKVEDCGVNTPLRKNVRDLLIENIVRFFPIEQSEKDNLKDAVLDKNRREEVKSFFRKHKTDEHIRKQVYDIADNKLSGRTVFCKEHILEHTEHSKEERKVFRLAPSLKTKIENVLAVIKDEILPKFTVNKVVMESNNFDIAAKTQGKKRLAKEEYGKGPREGKETRKEALLRETDGRCIYCGKSIDISNAHDDHIFPRKAGGLNIFANLVACCAVCNENKKGRTPLESGISPKPEIIAFMKNDLKKKILEDARNINTVDFNKYMSHASIGWRYMRDRLRESAGNKKLPIERQSGIYTAYFRRWWGFKKERGNTLHHALDAVILASRKGYSDDGLVDMTLKPKYNKGGEFDPEKHLPEPIEFKMDKGSRGSALHDRNPLSYKKGIITRRFMVTEIECGKEDDVISETYREKLKEAFKRFDTKKGKCLTDKEAKEAGFCIKKNELVMSLKCSIKGTGPGQMIRINNNVFKTNVHNVGVDVYLDEKGKKKAYERKNPRLSKHFIEPPPQPNGRVSFTLKRRDMVTVEGEDAIYRIKKLGTSPTIEAVVGSDGKTRTVSATKLTKANSAELEEGADKRTADGSEFESPKKKRKV

SEQ ID NO: 846 - protein, 972 aa, unidentified
MADSQNDTDEYWMGEALKLAQKAWDEGEVPVGAILVRKGEVIGHGWNRSIGSHDPSAHAEIMAIREAGVRIGNYRMLDTVLYVTLEPCAMCAGALVYGRISRLVFGAENPKTGACGSVMDIARHPALNHQLQVDGGVMAAPCARLLSDFFRWRRAQKKAARDNSSGNGTSGGSSGGSSGSETPGTSESATPESSGGSSGGSMERELVLGIAYGGKYTGLAVVDRRHNQVLYANRLKMRDDVAGILKDRRKQRGIRRTAQTKKKRLRELKNYLKSIGYNESTATFETVYSLAHKRGYDYADMPEEKTSEEIEAMDVEERKQWEKEKQEWEETKRNSRHRKEVVKDVHKAMIEGRATEEQIKRVERIFNKQYRPKRFNNRILTKCKVEDCGVNTPLRKNVRDLLIENIVRFFPIEQSEKDNLKDAVLDKNRREEVKSFFRKHKTDEHIRKQVYDIADNKLSGRTVFCKEHILEHTEHSKEERKVFRLAPSLKTKIENVLAVIKDEILPKFTVNKVVMESNNFDIAAKTQGKKRLAKEEYGKGPREGKETRKEALLRETDGRCIYCGKSIDISNAHDDHIFPRKAGGLNIFANLVACCAVCNENKKGRTPLESGISPKPEIIAFMKNDLKKKILEDARNINTVDFNKYMSHASIGWRYMRDRLRESAGNKKLPIERQSGIYTAYFRRWWGFKKERGNTLHHALDAVILASRKGYSDDGLVDMTLKPKYNKGGEFDPEKHLPEPIEFKMDKGSRGSALHDRNPLSYKKGIITRRFMVTEIECGKEDDVISETYREKLKEAFKRFDTKKGKCLTDKEAKEAGFCIKKNELVMSLKCSIKGTGPGQMIRINNNVFKTNVHNVGVDVYLDEKGKKKAYERKNPRLSKHFIEPPPQPNGRVSFTLKRRDMVTVEGEDAIYRIKKLGTSPTIEAVVGSDGKTRTVSATKLTKANSAELEEGADKRTADGSEFESPKKKRKV

SEQ ID NO: 847 - protein, 972 aa, unidentified
MTDSQNDTDEYWMGEALKLAQKAWDEGEVPVGAILVRKGEVIGHGWNRSIGSHDPSAHAEIMAIREAGVRIGNYRMLDTVLYVTLEPCAMCAGALVHGRISRLVFGAENPKTGACGSVMDIARHPALNRQLQVDGGVMAAPCARLLSDFFRWRRAQKKAARDNSSGNGTSGGSSGGSSGSETPGTSESATPESSGGSSGGSMERELVLGIAYGGKYTGLAVVDRRHNQVLYANRLKMRDDVAGILKDRRKQRGIRRTAQTKKKRLRELKNYLKSIGYNESTATFETVYSLAHKRGYDYADMPEEKTSEEIEAMDVEERKQWEKEKQEWEETKRNSRHRKEVVKDVHKAMIEGRATEEQIKRVERIFNKQYRPKRFNNRILTKCKVEDCGVNTPLRKNVRDLLIENIVRFFPIEQSEKDNLKDAVLDKNRREEVKSFFRKHKTDEHIRKQVYDIADNKLSGRTVFCKEHILEHTEHSKEERKVFRLAPSLKTKIENVLAVIKDEILPKFTVNKVVMESNNFDIAAKTQGKKRLAKEEYGKGPREGKETRKEALLRETDGRCIYCGKSIDISNAHDDHIFPRKAGGLNIFANLVACCAVCNENKKGRTPLESGISPKPEIIAFMKNDLKKKILEDARNINTVDFNKYMSHASIGWRYMRDRLRESAGNKKLPIERQSGIYTAYFRRWWGFKKERGNTLHHALDAVILASRKGYSDDGLVDMTLKPKYNKGGEFDPEKHLPEPIEFKMDKGSRGSALHDRNPLSYKKGIITRRFMVTEIECGKEDDVISETYREKLKEAFKRFDTKKGKCLTDKEAKEAGFCIKKNELVMSLKCSIKGTGPGQMIRINNNVFKTNVHNVGVDVYLDEKGKKKAYERKNPRLSKHFIEPPPQPNGRVSFTLKRRDMVTVEGEDAIYRIKKLGTSPTIEAVVGSDGKTRTVSATKLTKANSAELEEGADKRTADGSEFESPKKKRKV

SEQ ID NO: 848 - protein, 972 aa, unidentified
MTDSQNDTDEYWMGEALKLAQKAWDEGEVPVGAILVRKGEVIGHGWNRSIGSHDPSAHAEIMAIREAGVRIGNYRMLDTVLYVTLEPCAMCAGALVHGRISRLVFGADNPKTGACGSVMDIARHPALNHQLQVDGGVMAAPCARLLSDFFRWRRAQKKAARDNSSGNGTSGGSSGGSSGSETPGTSESATPESSGGSSGGSMERELVLGIAYGGKYTGLAVVDRRHNQVLYANRLKMRDDVAGILKDRRKQRGIRRTAQTKKKRLRELKNYLKSIGYNESTATFETVYSLAHKRGYDYADMPEEKTSEEIEAMDVEERKQWEKEKQEWEETKRNSRHRKEVVKDVHKAMIEGRATEEQIKRVERIFNKQYRPKRFNNRILTKCKVEDCGVNTPLRKNVRDLLIENIVRFFPIEQSEKDNLKDAVLDKNRREEVKSFFRKHKTDEHIRKQVYDIADNKLSGRTVFCKEHILEHTEHSKEERKVFRLAPSLKTKIENVLAVIKDEILPKFTVNKVVMESNNFDIAAKTQGKKRLAKEEYGKGPREGKETRKEALLRETDGRCIYCGKSIDISNAHDDHIFPRKAGGLNIFANLVACCAVCNENKKGRTPLESGISPKPEIIAFMKNDLKKKILEDARNINTVDFNKYMSHASIGWRYMRDRLRESAGNKKLPIERQSGIYTAYFRRWWGFKKERGNTLHHALDAVILASRKGYSDDGLVDMTLKPKYNKGGEFDPEKHLPEPIEFKMDKGSRGSALHDRNPLSYKKGIITRRFMVTEIECGKEDDVISETYREKLKEAFKRFDTKKGKCLTDKEAKEAGFCIKKNELVMSLKCSIKGTGPGQMIRINNNVFKTNVHNVGVDVYLDEKGKKKAYERKNPRLSKHFIEPPPQPNGRVSFTLKRRDMVTVEGEDAIYRIKKLGTSPTIEAVVGSDGKTRTVSATKLTKANSAELEEGADKRTADGSEFESPKKKRKV

SEQ ID NO: 849 - protein, 972 aa, unidentified
MTDSQNDTDEYWMGEALKLAQKAWDEGEVPVAAILVRKGEVIGHGWNRSIGSHDPSAHAEIMAIREAGVRIGNYRMLDTVLYVTLEPCAMCAGALVHGRISRLVFGAENPKTGACGSVMDIARHPALNHQLQVDGGVMAAPCARLLSDFFRWRRAQKKAARDNSSGNGTSGGSSGGSSGSETPGTSESATPESSGGSSGGSMERELVLGIAYGGKYTGLAVVDRRHNQVLYANRLKMRDDVAGILKDRRKQRGIRRTAQTKKKRLRELKNYLKSIGYNESTATFETVYSLAHKRGYDYADMPEEKTSEEIEAMDVEERKQWEKEKQEWEETKRNSRHRKEVVKDVHKAMIEGRATEEQIKRVERIFNKQYRPKRFNNRILTKCKVEDCGVNTPLRKNVRDLLIENIVRFFPIEQSEKDNLKDAVLDKNRREEVKSFFRKHKTDEHIRKQVYDIADNKLSGRTVFCKEHILEHTEHSKEERKVFRLAPSLKTKIENVLAVIKDEILPKFTVNKVVMESNNFDIAAKTQGKKRLAKEEYGKGPREGKETRKEALLRETDGRCIYCGKSIDISNAHDDHIFPRKAGGLNIFANLVACCAVCNENKKGRTPLESGISPKPEIIAFMKNDLKKKILEDARNINTVDFNKYMSHASIGWRYMRDRLRESAGNKKLPIERQSGIYTAYFRRWWGFKKERGNTLHHALDAVILASRKGYSDDGLVDMTLKPKYNKGGEFDPEKHLPEPIEFKMDKGSRGSALHDRNPLSYKKGIITRRFMVTEIECGKEDDVISETYREKLKEAFKRFDTKKGKCLTDKEAKEAGFCIKKNELVMSLKCSIKGTGPGQMIRINNNVFKTNVHNVGVDVYLDEKGKKKAYERKNPRLSKHFIEPPPQPNGRVSFTLKRRDMVTVEGEDAIYRIKKLGTSPTIEAVVGSDGKTRTVSATKLTKANSAELEEGADKRTADGSEFESPKKKRKV

SEQ ID NO: 850 - protein, 972 aa, unidentified
MTDSQNDTDEYWMGEALKLAQKAGDEGEVPVGAILVRKGEVIGHGWNRSIGSHDPSAHAEIMAIREAGVRIGNYRMLDTVLYVTLEPCAMCAGALVHGRISRLVFGAENPKTGACGSVMDIARHPALNHQLQVDGGVMAAPCARLLSDFFRWRRAQKKAARDNSSGNGTSGGSSGGSSGSETPGTSESATPESSGGSSGGSMERELVLGIAYGGKYTGLAVVDRRHNQVLYANRLKMRDDVAGILKDRRKQRGIRRTAQTKKKRLRELKNYLKSIGYNESTATFETVYSLAHKRGYDYADMPEEKTSEEIEAMDVEERKQWEKEKQEWEETKRNSRHRKEVVKDVHKAMIEGRATEEQIKRVERIFNKQYRPKRFNNRILTKCKVEDCGVNTPLRKNVRDLLIENIVRFFPIEQSEKDNLKDAVLDKNRREEVKSFFRKHKTDEHIRKQVYDIADNKLSGRTVFCKEHILEHTEHSKEERKVFRLAPSLKTKIENVLAVIKDEILPKFTVNKVVMESNNFDIAAKTQGKKRLAKEEYGKGPREGKETRKEALLRETDGRCIYCGKSIDISNAHDDHIFPRKAGGLNIFANLVACCAVCNENKKGRTPLESGISPKPEIIAFMKNDLKKKILEDARNINTVDFNKYMSHASIGWRYMRDRLRESAGNKKLPIERQSGIYTAYFRRWWGFKKERGNTLHHALDAVILASRKGYSDDGLVDMTLKPKYNKGGEFDPEKHLPEPIEFKMDKGSRGSALHDRNPLSYKKGIITRRFMVTEIECGKEDDVISETYREKLKEAFKRFDTKKGKCLTDKEAKEAGFCIKKNELVMSLKCSIKGTGPGQMIRINNNVFKTNVHNVGVDVYLDEKGKKKAYERKNPRLSKHFIEPPPQPNGRVSFTLKRRDMVTVEGEDAIYRIKKLGTSPTIEAVVGSDGKTRTVSATKLTKANSAELEEGADKRTADGSEFESPKKKRKV

SEQ ID NO: 851 - protein, 972 aa, unidentified
MTDSQNDTDEYWMGEALKLAQKAWDEGEVPVGAILVRKGEVIGHGWNRSIGSHDPSAHAEIMAIREAGVRIGNYRMLDTVLYVTLEPCAMCAGALVHGRISRLVFGAENPKTGACGSVMDIARYPALNHQLQVDGGVMAAPCARLLSDFFRWRRAQKKAARDNSSGNGTSGGSSGGSSGSETPGTSESATPESSGGSSGGSMERELVLGIAYGGKYTGLAVVDRRHNQVLYANRLKMRDDVAGILKDRRKQRGIRRTAQTKKKRLRELKNYLKSIGYNESTATFETVYSLAHKRGYDYADMPEEKTSEEIEAMDVEERKQWEKEKQEWEETKRNSRHRKEVVKDVHKAMIEGRATEEQIKRVERIFNKQYRPKRFNNRILTKCKVEDCGVNTPLRKNVRDLLIENIVRFFPIEQSEKDNLKDAVLDKNRREEVKSFFRKHKTDEHIRKQVYDIADNKLSGRTVFCKEHILEHTEHSKEERKVFRLAPSLKTKIENVLAVIKDEILPKFTVNKVVMESNNFDIAAKTQGKKRLAKEEYGKGPREGKETRKEALLRETDGRCIYCGKSIDISNAHDDHIFPRKAGGLNIFANLVACCAVCNENKKGRTPLESGISPKPEIIAFMKNDLKKKILEDARNINTVDFNKYMSHASIGWRYMRDRLRESAGNKKLPIERQSGIYTAYFRRWWGFKKERGNTLHHALDAVILASRKGYSDDGLVDMTLKPKYNKGGEFDPEKHLPEPIEFKMDKGSRGSALHDRNPLSYKKGIITRRFMVTEIECGKEDDVISETYREKLKEAFKRFDTKKGKCLTDKEAKEAGFCIKKNELVMSLKCSIKGTGPGQMIRINNNVFKTNVHNVGVDVYLDEKGKKKAYERKNPRLSKHFIEPPPQPNGRVSFTLKRRDMVTVEGEDAIYRIKKLGTSPTIEAVVGSDGKTRTVSATKLTKANSAELEEGADKRTADGSEFESPKKKRKV

SEQ ID NO: 852 - protein, 972 aa, unidentified
MTDSQNDTDEYWMGEALKLAQKAWDEGEVPVGAILVRKGEVIGHGWNRSIGSHDPSAHAEIMAIREAGVRIGNYRMLDTVLYVTLEPCAMCAGALVHGRISRLVFGAENPKTGACGSVMDIARHPALNNQLQVDGGVMAAPCARLLSDFFRWRRAQKKAARDNSSGNGTSGGSSGGSSGSETPGTSESATPESSGGSSGGSMERELVLGIAYGGKYTGLAVVDRRHNQVLYANRLKMRDDVAGILKDRRKQRGIRRTAQTKKKRLRELKNYLKSIGYNESTATFETVYSLAHKRGYDYADMPEEKTSEEIEAMDVEERKQWEKEKQEWEETKRNSRHRKEVVKDVHKAMIEGRATEEQIKRVERIFNKQYRPKRFNNRILTKCKVEDCGVNTPLRKNVRDLLIENIVRFFPIEQSEKDNLKDAVLDKNRREEVKSFFRKHKTDEHIRKQVYDIADNKLSGRTVFCKEHILEHTEHSKEERKVFRLAPSLKTKIENVLAVIKDEILPKFTVNKVVMESNNFDIAAKTQGKKRLAKEEYGKGPREGKETRKEALLRETDGRCIYCGKSIDISNAHDDHIFPRKAGGLNIFANLVACCAVCNENKKGRTPLESGISPKPEIIAFMKNDLKKKILEDARNINTVDFNKYMSHASIGWRYMRDRLRESAGNKKLPIERQSGIYTAYFRRWWGFKKERGNTLHHALDAVILASRKGYSDDGLVDMTLKPKYNKGGEFDPEKHLPEPIEFKMDKGSRGSALHDRNPLSYKKGIITRRFMVTEIECGKEDDVISETYREKLKEAFKRFDTKKGKCLTDKEAKEAGFCIKKNELVMSLKCSIKGTGPGQMIRINNNVFKTNVHNVGVDVYLDEKGKKKAYERKNPRLSKHFIEPPPQPNGRVSFTLKRRDMVTVEGEDAIYRIKKLGTSPTIEAVVGSDGKTRTVSATKLTKANSAELEEGADKRTADGSEFESPKKKRKV

SEQ ID NO: 853 - protein, 972 aa, unidentified
MTDSQNDTDEYWMGEALKLAQKAWDEGEVPVGAILVRKGEVIGHGWNRSIGSHDPSAHAEIMAIREAGVRIGNYHMLDTVLYVTLEPCAMCAGALVHGRISRLVFGAENPKTGACGSVMDIARHPALNHQLQVDGGVMAAPCARLLSDFFRWRRAQKKAARDNSSGNGTSGGSSGGSSGSETPGTSESATPESSGGSSGGSMERELVLGIAYGGKYTGLAVVDRRHNQVLYANRLKMRDDVAGILKDRRKQRGIRRTAQTKKKRLRELKNYLKSIGYNESTATFETVYSLAHKRGYDYADMPEEKTSEEIEAMDVEERKQWEKEKQEWEETKRNSRHRKEVVKDVHKAMIEGRATEEQIKRVERIFNKQYRPKRFNNRILTKCKVEDCGVNTPLRKNVRDLLIENIVRFFPIEQSEKDNLKDAVLDKNRREEVKSFFRKHKTDEHIRKQVYDIADNKLSGRTVFCKEHILEHTEHSKEERKVFRLAPSLKTKIENVLAVIKDEILPKFTVNKVVMESNNFDIAAKTQGKKRLAKEEYGKGPREGKETRKEALLRETDGRCIYCGKSIDISNAHDDHIFPRKAGGLNIFANLVACCAVCNENKKGRTPLESGISPKPEIIAFMKNDLKKKILEDARNINTVDFNKYMSHASIGWRYMRDRLRESAGNKKLPIERQSGIYTAYFRRWWGFKKERGNTLHHALDAVILASRKGYSDDGLVDMTLKPKYNKGGEFDPEKHLPEPIEFKMDKGSRGSALHDRNPLSYKKGIITRRFMVTEIECGKEDDVISETYREKLKEAFKRFDTKKGKCLTDKEAKEAGFCIKKNELVMSLKCSIKGTGPGQMIRINNNVFKTNVHNVGVDVYLDEKGKKKAYERKNPRLSKHFIEPPPQPNGRVSFTLKRRDMVTVEGEDAIYRIKKLGTSPTIEAVVGSDGKTRTVSATKLTKANSAELEEGADKRTADGSEFESPKKKRKV

SEQ ID NO: 854 - protein, 972 aa, unidentified
MTDSQNDTDEYWMGEALKLAQKAWDEGEVPVGAILVRKGEVIGHGWNRSIGSHDPSAHAEIMAIREAGVRIGNYRMLDTVLYVTLEPCAMCAGALVLGRISRLVFGAENPKTGACGSVMDIARHPALNHQLQVDGGVMAAPCARLLSDFFRWRRAQKKAARDNSSGNGTSGGSSGGSSGSETPGTSESATPESSGGSSGGSMERELVLGIAYGGKYTGLAVVDRRHNQVLYANRLKMRDDVAGILKDRRKQRGIRRTAQTKKKRLRELKNYLKSIGYNESTATFETVYSLAHKRGYDYADMPEEKTSEEIEAMDVEERKQWEKEKQEWEETKRNSRHRKEVVKDVHKAMIEGRATEEQIKRVERIFNKQYRPKRFNNRILTKCKVEDCGVNTPLRKNVRDLLIENIVRFFPIEQSEKDNLKDAVLDKNRREEVKSFFRKHKTDEHIRKQVYDIADNKLSGRTVFCKEHILEHTEHSKEERKVFRLAPSLKTKIENVLAVIKDEILPKFTVNKVVMESNNFDIAAKTQGKKRLAKEEYGKGPREGKETRKEALLRETDGRCIYCGKSIDISNAHDDHIFPRKAGGLNIFANLVACCAVCNENKKGRTPLESGISPKPEIIAFMKNDLKKKILEDARNINTVDFNKYMSHASIGWRYMRDRLRESAGNKKLPIERQSGIYTAYFRRWWGFKKERGNTLHHALDAVILASRKGYSDDGLVDMTLKPKYNKGGEFDPEKHLPEPIEFKMDKGSRGSALHDRNPLSYKKGIITRRFMVTEIECGKEDDVISETYREKLKEAFKRFDTKKGKCLTDKEAKEAGFCIKKNELVMSLKCSIKGTGPGQMIRINNNVFKTNVHNVGVDVYLDEKGKKKAYERKNPRLSKHFIEPPPQPNGRVSFTLKRRDMVTVEGEDAIYRIKKLGTSPTIEAVVGSDGKTRTVSATKLTKANSAELEEGADKRTADGSEFESPKKKRKV

SEQ ID NO: 855 - protein, 972 aa, unidentified
MTDSQNDTDEYWMGEALKLAQKAWDEGEVPVGAILVRKGEVIGHGWNRSIGSHDPSAHAEIMSIREAGVRIGNYRMLDTVLYVTLEPCAMCAGALVHGRISRLVFGAENPKTGACGSVMDIARHPALNHQLQVDGGVMAAPCARLLSDFFRWRRAQKKAARDNSSGNGTSGGSSGGSSGSETPGTSESATPESSGGSSGGSMERELVLGIAYGGKYTGLAVVDRRHNQVLYANRLKMRDDVAGILKDRRKQRGIRRTAQTKKKRLRELKNYLKSIGYNESTATFETVYSLAHKRGYDYADMPEEKTSEEIEAMDVEERKQWEKEKQEWEETKRNSRHRKEVVKDVHKAMIEGRATEEQIKRVERIFNKQYRPKRFNNRILTKCKVEDCGVNTPLRKNVRDLLIENIVRFFPIEQSEKDNLKDAVLDKNRREEVKSFFRKHKTDEHIRKQVYDIADNKLSGRTVFCKEHILEHTEHSKEERKVFRLAPSLKTKIENVLAVIKDEILPKFTVNKVVMESNNFDIAAKTQGKKRLAKEEYGKGPREGKETRKEALLRETDGRCIYCGKSIDISNAHDDHIFPRKAGGLNIFANLVACCAVCNENKKGRTPLESGISPKPEIIAFMKNDLKKKILEDARNINTVDFNKYMSHASIGWRYMRDRLRESAGNKKLPIERQSGIYTAYFRRWWGFKKERGNTLHHALDAVILASRKGYSDDGLVDMTLKPKYNKGGEFDPEKHLPEPIEFKMDKGSRGSALHDRNPLSYKKGIITRRFMVTEIECGKEDDVISETYREKLKEAFKRFDTKKGKCLTDKEAKEAGFCIKKNELVMSLKCSIKGTGPGQMIRINNNVFKTNVHNVGVDVYLDEKGKKKAYERKNPRLSKHFIEPPPQPNGRVSFTLKRRDMVTVEGEDAIYRIKKLGTSPTIEAVVGSDGKTRTVSATKLTKANSAELEEGADKRTADGSEFESPKKKRKV

SEQ ID NO: 856 - protein, 972 aa, unidentified
MTDSQNDTDEYWMGEALKLAQKAWDEGEVPVGAILVRKGEVIGHGWNRSIGSHDPSAHAEIMAIREAGVRIGNYRMLDTVLYVTLEPCAMRAGALVHGRISRLVFGAENPKTGACGSVMDIARHPALNHQLQVDGGVMAAPCARLLSDFFRWRRAQKKAARDNSSGNGTSGGSSGGSSGSETPGTSESATPESSGGSSGGSMERELVLGIAYGGKYTGLAVVDRRHNQVLYANRLKMRDDVAGILKDRRKQRGIRRTAQTKKKRLRELKNYLKSIGYNESTATFETVYSLAHKRGYDYADMPEEKTSEEIEAMDVEERKQWEKEKQEWEETKRNSRHRKEVVKDVHKAMIEGRATEEQIKRVERIFNKQYRPKRFNNRILTKCKVEDCGVNTPLRKNVRDLLIENIVRFFPIEQSEKDNLKDAVLDKNRREEVKSFFRKHKTDEHIRKQVYDIADNKLSGRTVFCKEHILEHTEHSKEERKVFRLAPSLKTKIENVLAVIKDEILPKFTVNKVVMESNNFDIAAKTQGKKRLAKEEYGKGPREGKETRKEALLRETDGRCIYCGKSIDISNAHDDHIFPRKAGGLNIFANLVACCAVCNENKKGRTPLESGISPKPEIIAFMKNDLKKKILEDARNINTVDFNKYMSHASIGWRYMRDRLRESAGNKKLPIERQSGIYTAYFRRWWGFKKERGNTLHHALDAVILASRKGYSDDGLVDMTLKPKYNKGGEFDPEKHLPEPIEFKMDKGSRGSALHDRNPLSYKKGIITRRFMVTEIECGKEDDVISETYREKLKEAFKRFDTKKGKCLTDKEAKEAGFCIKKNELVMSLKCSIKGTGPGQMIRINNNVFKTNVHNVGVDVYLDEKGKKKAYERKNPRLSKHFIEPPPQPNGRVSFTLKRRDMVTVEGEDAIYRIKKLGTSPTIEAVVGSDGKTRTVSATKLTKANSAELEEGADKRTADGSEFESPKKKRKV

SEQ ID NO: 857 - protein, 972 aa, unidentified
MTDSQNDTDEYWMGEALKLAQKAWDEGEVPVGAILVRKGEVIGHGWNRSIGSHDPSAHAEIMAIREAGVRIGNYRMLDTVLYVTLEPCAMCAWALVHGRISRLVFGAENPKTGACGSVMDIARHPALNHQLQVDGGVMAAPCARLLSDFFRWRRAQKKAARDNSSGNGTSGGSSGGSSGSETPGTSESATPESSGGSSGGSMERELVLGIAYGGKYTGLAVVDRRHNQVLYANRLKMRDDVAGILKDRRKQRGIRRTAQTKKKRLRELKNYLKSIGYNESTATFETVYSLAHKRGYDYADMPEEKTSEEIEAMDVEERKQWEKEKQEWEETKRNSRHRKEVVKDVHKAMIEGRATEEQIKRVERIFNKQYRPKRFNNRILTKCKVEDCGVNTPLRKNVRDLLIENIVRFFPIEQSEKDNLKDAVLDKNRREEVKSFFRKHKTDEHIRKQVYDIADNKLSGRTVFCKEHILEHTEHSKEERKVFRLAPSLKTKIENVLAVIKDEILPKFTVNKVVMESNNFDIAAKTQGKKRLAKEEYGKGPREGKETRKEALLRETDGRCIYCGKSIDISNAHDDHIFPRKAGGLNIFANLVACCAVCNENKKGRTPLESGISPKPEIIAFMKNDLKKKILEDARNINTVDFNKYMSHASIGWRYMRDRLRESAGNKKLPIERQSGIYTAYFRRWWGFKKERGNTLHHALDAVILASRKGYSDDGLVDMTLKPKYNKGGEFDPEKHLPEPIEFKMDKGSRGSALHDRNPLSYKKGIITRRFMVTEIECGKEDDVISETYREKLKEAFKRFDTKKGKCLTDKEAKEAGFCIKKNELVMSLKCSIKGTGPGQMIRINNNVFKTNVHNVGVDVYLDEKGKKKAYERKNPRLSKHFIEPPPQPNGRVSFTLKRRDMVTVEGEDAIYRIKKLGTSPTIEAVVGSDGKTRTVSATKLTKANSAELEEGADKRTADGSEFESPKKKRKV

SEQ ID NO: 858 - protein, 972 aa, unidentified
MTDSQNDTDEYWMGEALKLAQKAWDEGEVPVGAILVRKGEVIGHGWNRSIGSHDPSAHAEIMAIREAGVRIGNYRMLDTVLYVTLEPCAMCAGALVHGRISRLVFGAENPKTGACGSVMDIARHPALNHQLQVDGGVMAAPCARLLSDFSRWRRAQKKAARDNSSGNGTSGGSSGGSSGSETPGTSESATPESSGGSSGGSMERELVLGIAYGGKYTGLAVVDRRHNQVLYANRLKMRDDVAGILKDRRKQRGIRRTAQTKKKRLRELKNYLKSIGYNESTATFETVYSLAHKRGYDYADMPEEKTSEEIEAMDVEERKQWEKEKQEWEETKRNSRHRKEVVKDVHKAMIEGRATEEQIKRVERIFNKQYRPKRFNNRILTKCKVEDCGVNTPLRKNVRDLLIENIVRFFPIEQSEKDNLKDAVLDKNRREEVKSFFRKHKTDEHIRKQVYDIADNKLSGRTVFCKEHILEHTEHSKEERKVFRLAPSLKTKIENVLAVIKDEILPKFTVNKVVMESNNFDIAAKTQGKKRLAKEEYGKGPREGKETRKEALLRETDGRCIYCGKSIDISNAHDDHIFPRKAGGLNIFANLVACCAVCNENKKGRTPLESGISPKPEIIAFMKNDLKKKILEDARNINTVDFNKYMSHASIGWRYMRDRLRESAGNKKLPIERQSGIYTAYFRRWWGFKKERGNTLHHALDAVILASRKGYSDDGLVDMTLKPKYNKGGEFDPEKHLPEPIEFKMDKGSRGSALHDRNPLSYKKGIITRRFMVTEIECGKEDDVISETYREKLKEAFKRFDTKKGKCLTDKEAKEAGFCIKKNELVMSLKCSIKGTGPGQMIRINNNVFKTNVHNVGVDVYLDEKGKKKAYERKNPRLSKHFIEPPPQPNGRVSFTLKRRDMVTVEGEDAIYRIKKLGTSPTIEAVVGSDGKTRTVSATKLTKANSAELEEGADKRTADGSEFESPKKKRKV

SEQ ID NO: 859 - protein, 972 aa, unidentified
MTDSQNDTDEYWMGEALKLAQKAWDEGEVPVGAILVRKGEVIGHGWNRSIGSHDPSAHAEIMAIRVAGVRIGNYRMLDTVLYVTLEPCAMCAGALVHGRISRLVFGAENPKTGACGSVMDIARHPALNHQLQVDGGVMAAPCARLLSDFFRWRRAQKKAARDNSSGNGTSGGSSGGSSGSETPGTSESATPESSGGSSGGSMERELVLGIAYGGKYTGLAVVDRRHNQVLYANRLKMRDDVAGILKDRRKQRGIRRTAQTKKKRLRELKNYLKSIGYNESTATFETVYSLAHKRGYDYADMPEEKTSEEIEAMDVEERKQWEKEKQEWEETKRNSRHRKEVVKDVHKAMIEGRATEEQIKRVERIFNKQYRPKRFNNRILTKCKVEDCGVNTPLRKNVRDLLIENIVRFFPIEQSEKDNLKDAVLDKNRREEVKSFFRKHKTDEHIRKQVYDIADNKLSGRTVFCKEHILEHTEHSKEERKVFRLAPSLKTKIENVLAVIKDEILPKFTVNKVVMESNNFDIAAKTQGKKRLAKEEYGKGPREGKETRKEALLRETDGRCIYCGKSIDISNAHDDHIFPRKAGGLNIFANLVACCAVCNENKKGRTPLESGISPKPEIIAFMKNDLKKKILEDARNINTVDFNKYMSHASIGWRYMRDRLRESAGNKKLPIERQSGIYTAYFRRWWGFKKERGNTLHHALDAVILASRKGYSDDGLVDMTLKPKYNKGGEFDPEKHLPEPIEFKMDKGSRGSALHDRNPLSYKKGIITRRFMVTEIECGKEDDVISETYREKLKEAFKRFDTKKGKCLTDKEAKEAGFCIKKNELVMSLKCSIKGTGPGQMIRINNNVFKTNVHNVGVDVYLDEKGKKKAYERKNPRLSKHFIEPPPQPNGRVSFTLKRRDMVTVEGEDAIYRIKKLGTSPTIEAVVGSDGKTRTVSATKLTKANSAELEEGADKRTADGSEFESPKKKRKV

SEQ ID NO: 860 - protein, 972 aa, unidentified
MTDSQNDTDEYWMGEALKLAQKAWDEGEVPVGAILVRKGEVIGHGWNRSIGSHDPSAHAEIMAIRDAGVRIGNYRMLDTVLYVTLEPCAMCAGALVHGRISRLVFGAENPKTGACGSVMDIARHPALNHQLQVDGGVMAAPCARLLSDFFRWRRAQKKAARDNSSGNGTSGGSSGGSSGSETPGTSESATPESSGGSSGGSMERELVLGIAYGGKYTGLAVVDRRHNQVLYANRLKMRDDVAGILKDRRKQRGIRRTAQTKKKRLRELKNYLKSIGYNESTATFETVYSLAHKRGYDYADMPEEKTSEEIEAMDVEERKQWEKEKQEWEETKRNSRHRKEVVKDVHKAMIEGRATEEQIKRVERIFNKQYRPKRFNNRILTKCKVEDCGVNTPLRKNVRDLLIENIVRFFPIEQSEKDNLKDAVLDKNRREEVKSFFRKHKTDEHIRKQVYDIADNKLSGRTVFCKEHILEHTEHSKEERKVFRLAPSLKTKIENVLAVIKDEILPKFTVNKVVMESNNFDIAAKTQGKKRLAKEEYGKGPREGKETRKEALLRETDGRCIYCGKSIDISNAHDDHIFPRKAGGLNIFANLVACCAVCNENKKGRTPLESGISPKPEIIAFMKNDLKKKILEDARNINTVDFNKYMSHASIGWRYMRDRLRESAGNKKLPIERQSGIYTAYFRRWWGFKKERGNTLHHALDAVILASRKGYSDDGLVDMTLKPKYNKGGEFDPEKHLPEPIEFKMDKGSRGSALHDRNPLSYKKGIITRRFMVTEIECGKEDDVISETYREKLKEAFKRFDTKKGKCLTDKEAKEAGFCIKKNELVMSLKCSIKGTGPGQMIRINNNVFKTNVHNVGVDVYLDEKGKKKAYERKNPRLSKHFIEPPPQPNGRVSFTLKRRDMVTVEGEDAIYRIKKLGTSPTIEAVVGSDGKTRTVSATKLTKANSAELEEGADKRTADGSEFESPKKKRKV

SEQ ID NO: 861 - DNA, 20 bp, synthetic construct
  source 1..20: mol_type = other DNA
gaacacaaagcatagactgc

SEQ ID NO: 862 - DNA, 20 bp, synthetic construct
  source 1..20: mol_type = other DNA
gggaaagacccagcatccgt

SEQ ID NO: 863 - DNA, 20 bp, synthetic construct
  source 1..20: mol_type = other DNA
gatgagaaggagaagttctt

SEQ ID NO: 864 - DNA, 21 bp, synthetic construct
  source 1..21: mol_type = other DNA
ggtcgtagccagtccgaaccc

SEQ ID NO: 865 - DNA, 36 bp, synthetic construct; identical to SEQ ID NO: 690
  source 1..36: mol_type = other DNA

SEQ ID NO: 866 - DNA, 39 bp, synthetic construct; identical to SEQ ID NO: 691
  source 1..39: mol_type = other DNA

SEQ ID NO: 867 - DNA, 36 bp, synthetic construct; identical to SEQ ID NO: 692
  source 1..36: mol_type = other DNA

SEQ ID NO: 868 - DNA, 36 bp, synthetic construct; identical to SEQ ID NO: 693
  source 1..36: mol_type = other DNA

SEQ ID NO: 869 - DNA, 41 bp, synthetic construct; identical to SEQ ID NO: 702
  source 1..41: mol_type = other DNA

SEQ ID NO: 870 - DNA, 36 bp, synthetic construct; identical to SEQ ID NO: 703
  source 1..36: mol_type = other DNA

SEQ ID NO: 871 - DNA, 36 bp, synthetic construct
  source 1..36: mol_type = other DNA
gctcttccgatctnnnnncacccggctgctggaata

SEQ ID NO: 872 - DNA, 36 bp, synthetic construct
  source 1..36: mol_type = other DNA
gctcttccgatctnnnnntgtgtgtgtgtgtagggc

SEQ ID NO: 873 - DNA, 3348 bp, synthetic construct; identical to SEQ ID NO: 720
  source 1..3348: mol_type = other DNA

SEQ ID NO: 874 - DNA, 2870 bp, synthetic construct
  source 1..2870: mol_type = other DNA
ttctgaggcggaaagaaccagctggggctcgataccgtcgacctctagctagagcttggcgtaatcatggtcatagctgtttcctgtgtgaaattgttatccgctcacaattccacacaacatacgagccggaagcataaagtgtaaagcctagggtgcctaatgagtgagctaactcacattaattgcgttgcgctcactgcccgctttccagtcgggaaacctgtcgtgccagctgcattaatgaatcggccaacgcgcggggagaggcggtttgcgtattgggcgctcttccgcttcctcgctcactgactcgctgcgctcggtcgttcggctgcggcgagcggtatcagctcactcaaaggcggtaatacggttatccacagaatcaggggataacgcaggaaagaacatgtgagcaaaaggccagcaaaaggccaggaaccgtaaaaaggccgcgttgctggcgtttttccataggctccgcccccctgacgagcatcacaaaaatcgacgctcaagtcagaggtggcgaaacccgacaggactataaagataccaggcgtttccccctggaagctccctcgtgcgctctcctgttccgaccctgccgcttaccggatacctgtccgcctttctcccttcgggaagcgtggcgctttctcatagctcacgctgtaggtatctcagttcggtgtaggtcgttcgctccaagctgggctgtgtgcacgaaccccccgttcagcccgaccgctgcgccttatccggtaactatcgtcttgagtccaacccggtaagacacgacttatcgccactggcagcagccactggtaacaggattagcagagcgaggtatgtaggcggtgctacagagttcttgaagtggtggcctaactacggctacactagaagaacagtatttggtatctgcgctctgctgaagccagttaccttcggaaaaagagttggtagctcttgatccggcaaacaaaccaccgctggtagcggtggtttttttgtttgcaagcagcagattacgcgcagaaaaaaaggatctcaagaagatcctttgatcttttctacggggtctgacgctcagtggaacgaaaactcacgttaagggattttggtcatgagattatcaaaaaggatcttcacctagatccttttaaattaaaaatgaagttttaaatcaatctaaagtatatatgagtaaacttggtctgacagttaccaatgcttaatcagtgaggcacctatctcagcgatctgtctatttcgttcatccatagttgcctgactccccgtcgtgtagataactacgatacgggagggcttaccatctggccccagtgctgcaatgataccgcgagacccacgctcaccggctccagatttatcagcaataaaccagccagccggaagggccgagcgcagaagtggtcctgcaactttatccgcctccatccagtctattaattgttgccgggaagctagagtaagtagttcgccagttaatagtttgcgcaacgttgttgccattgctacaggcatcgtggtgtcacgctcgtcgtttggtatggcttcattcagctccggttcccaacgatcaaggcgagttacatgatcccccatgttgtgcaaaaaagcggttagctccttcggtcctccgatcgttgtcagaagtaagttggccgcagtgttatcactcatggttatggcagcactgcataattctcttactgtcatgccatccgtaagatgcttttctgtgactggtgagtactcaaccaagtcattctgagaatagtgtatgcggcgaccgagttgctcttgcccggcgtcaatacgggataataccgcgccacatagcagaactttaaaagtgctcatcattggaaaacgttcttcggggcgaaaactctcaaggatcttaccgctgttgagatccagttcgatgtaacccactcgtgcacccaactgatcttcagcatcttttactttcaccagcgtttctgggtgagcaaaaacaggaaggcaaaatgccgcaaaaaagggaataagggcgacacggaaatgttgaatactcatactcttcctttttcaatattattgaagcatttatcagggttattgtctcatgagcggatacatatttgaatgtatttagaaaaataaacaaataggggttccgcgcacatttccccgaaaagtgccacctgacgtcgaccctagggtcgactctcagtacaatctgctctgatgccgaagcttgagggcctatttcccatgattccttcatatttgcatatacgatacaaggctgttagagagataattagaattaatttgactgtaaacacaaagatattagtacaaaatacgtgacgtagaaagtaataatttcttgggtagtttgcagttttaaaattatgttttaaaatggactatcatatgcttaccgtaacttgaaagtatttcgatttcttggctttatatatcttgtggaaaggacgaaacaccgaacacaaagcatagactgcgttacagttaagaaattaattgtaaaacgcctatacagtgaagggatatacgcttgggtttgtccagcctgagcctctatgccagaaatggcgccttcatcgtgggttaggacatttaatttttttcatagttaagccagtatctgctccctgcttgtgtgttggaggtcgctgagtagtgcgcgagcaaaatttaagctacaacaaggcaaggcttgaccgacaattgcatgaagaatctgcttagggttaggcgttttgcgctgcttcgcgatgtacgggccagatatacgcgttgcatgctggggatgcggtgggctctatggc

SEQ ID NO: 875 - DNA, 9519 bp, synthetic construct; identical to SEQ ID NO: 486
  source 1..9519: mol_type = other DNA

SEQ ID NO: 876 - DNA, 123 bp, synthetic construct; identical to SEQ ID NO: 489
  source 1..123: mol_type = other DNA

SEQ ID NO: 877 - protein, 1846 aa, unidentified
MTFLRMDIPDGPLAGRPVRSRMDGVHPVHGRVLALQRAAGNAATTSALGTVQRSVVDEIARMKPDQLVVALQELNPKAAATNLWVTVDGKPVTELISRPAGFESLWPIQSGRGPHAEERFAQGVMPLLAARQPRYILLEITKSPCPSCTALLSQLVGEHPGTRFELHMLGLYPGAGEAEGERGAATRPEDLAELERKLQAKLLDLRAVIDRLTDEQWRKRFKYPKHTKIPIGTRIAALKFARSVHTTMVEARLKLGERQDQTAYGAKLKDLEDKFAELAAFLTAKKADATASARHEPYPAHETGRPTPAAETVTDLDRWTAIKAECPDLQLSEQTYGEYFLYSSHRAFTWFYVHNSLPESGTETPGTSESATPESDKKYSIGLAIGTNSVGWAVITDEYKVPSKKFKVLGNTDRHSIKKNLIGALLFDSGETAEATRLKRTARRRYTRRKNRICYLQEIFSNEMAKVDDSFFHRLEESFLVEEDKKHERHPIFGNIVDEVAYHEKYPTIYHLRKKLVDSTDKADLRLIYLALAHMIKFRGHFLIEGDLNPDNSDVDKLFIQLVQTYNQLFEENPINASGVDAKAILSARLSKSRRLENLIAQLPGEKKNGLFGNLIALSLGLTPNFKSNFDLAEDAKLQLSKDTYDDDLDNLLAQIGDQYADLFLAAKNLSDAILLSDILRVNTEITKAPLSASMIKRYDEHHQDLTLLKALVRQQLPEKYKEIFFDQSKNGYAGYIDGGASQEEFYKFIKPILEKMDGTEELLVKLNREDLLRKQRTFDNGSIPHQIHLGELHAILRRQEDFYPFLKDNREKIEKILTFRIPYYVGPLARGNSRFAWMTRKSEETITPWNFEEVVDKGASAQSFIERMTNFDKNLPNEKVLPKHSLLYEYFTVYNELTKVKYVTEGMRKPAFLSGEQKKAIVDLLFKTNRKVTVKQLKEDYFKKIECFDSVEISGVEDRFNASLGTYHDLLKIIKDKDFLDNEENEDILEDIVLTLTLFEDREMIEERLKTYAHLFDDKVMKQLKRRRYTGWGRLSRKLINGIRDKQSGKTILDFLKSDGFANRNFMQLIHDDSLTFKEDIQKAQVSGQGDSLHEHIANLAGSPAIKKGILQTVKVVDELVKVMGRHKPENIVIEMARENQTTQKGQKNSRERMKRIEEGIKELGSQILKEHPVENTQLQNEKLYLYYLQNGRDMYVDQELDINRLSDYDVDHIVPQSFLKDDSIDNKVLTRSDKNRGKSDNVPSEEVVKKMKNYWRQLLNAKLITQRKFDNLTKAERGGLSELDKAGFIKRQLVETRQITKHVAQILDSRMNTKYDENDKLIREVKVITLKSKLVSDFRKDFQFYKVREINNYHHAHDAYLNAVVGTALIKKYPKLESEFVYGDYKVYDVRKMIAKSEQEIGKATAKYFFYSNIMNFFKTEITLANGEIRKRPLIETNGETGEIVWDKGRDFATVRKVLSMPQVNIVKKTEVQTGGFSKESILPKRNSDKLIARKKDWDPKKYGGFDSPTVAYSVLVVAKVEKGKSKKLKSVKELLGITIMERSSFEKNPIDFLEAKGYKEVKKDLIIKLPKYSLFELENGRKRMLASAGELQKGNELALPSKYVNFLYLASHYEKLKGSPEDNEQKQLFVEQHKHYLDEIIEQISEFSKRVILADANLDKVLSAYNKHRDKPIREQAENIIHLFTLTNLGAPAAFKYFDTTIDRKRYTSTKEVLDATLIHQSITGLYETRIDLSQLGGDSGGSSMSKTIKDLEEFAAEKLGYDIVFQESISMEPQEVEHLITTDEKSVLVNSTYDDNKEITISMISTPHPEYRPIALIIQDMEGEVQRKELGSGGSPKKKRKV

SEQ ID NO: 878 - protein, 1723 aa, unidentified
MASETGPSAGDPTLRRRIEPWEFEVFFDPRELRRETCLLYEIQWGTSHRRWRKSGKNTTNHAEVNFIEKLTSERQFCPSVRCSITWFLSWSPCWECSQAIQEFLSQHPNVTLVIYVARLYYHMDQRNRQGLRDLVNSGVTIQIMSVPEYCYCWRNFVNFPPGQEAHWPRYQPQWMALYELELHCIILSLPPCLKISRRCQKQLTFFGLTLQNCHYQAIPPHILLATGLVLPFVPWRSGTETPGTSESATPESDKKYSIGLAIGTNSVGWAVITDEYKVPSKKFKVLGNTDRHSIKKNLIGALLFDSGETAEATRLKRTARRRYTRRKNRICYLQEIFSNEMAKVDDSFFHRLEESFLVEEDKKHERHPIFGNIVDEVAYHEKYPTIYHLRKKLVDSTDKADLRLIYLALAHMIKFRGHFLIEGDLNPDNSDVDKLFIQLVQTYNQLFEENPINASGVDAKAILSARLSKSRRLENLIAQLPGEKKNGLFGNLIALSLGLTPNFKSNFDLAEDAKLQLSKDTYDDDLDNLLAQIGDQYADLFLAAKNLSDAILLSDILRVNTEITKAPLSASMIKRYDEHHQDLTLLKALVRQQLPEKYKEIFFDQSKNGYAGYIDGGASQEEFYKFIKPILEKMDGTEELLVKLNREDLLRKQRTFDNGSIPHQIHLGELHAILRRQEDFYPFLKDNREKIEKILTFRIPYYVGPLARGNSRFAWMTRKSEETITPWNFEEVVDKGASAQSFIERMTNFDKNLPNEKVLPKHSLLYEYFTVYNELTKVKYVTEGMRKPAFLSGEQKKAIVDLLFKTNRKVTVKQLKEDYFKKIECFDSVEISGVEDRFNASLGTYHDLLKIIKDKDFLDNEENEDILEDIVLTLTLFEDREMIEERLKTYAHLFDDKVMKQLKRRRYTGWGRLSRKLINGIRDKQSGKTILDFLKSDGFANRNFMQLIHDDSLTFKEDIQKAQVSGQGDSLHEHIANLAGSPAIKKGILQTVKVVDELVKVMGRHKPENIVIEMARENQTTQKGQKNSRERMKRIEEGIKELGSQILKEHPVENTQLQNEKLYLYYLQNGRDMYVDQELDINRLSDYDVDHIVPQSFLKDDSIDNKVLTRSDKNRGKSDNVPSEEVVKKMKNYWRQLLNAKLITQRKFDNLTKAERGGLSELDKAGFIKRQLVETRQITKHVAQILDSRMNTKYDENDKLIREVKVITLKSKLVSDFRKDFQFYKVREINNYHHAHDAYLNAVVGTALIKKYPKLESEFVYGDYKVYDVRKMIAKSEQEIGKATAKYFFYSNIMNFFKTEITLANGEIRKRPLIETNGETGEIVWDKGRDFATVRKVLSMPQVNIVKKTEVQTGGFSKESILPKRNSDKLIARKKDWDPKKYGGFDSPTVAYSVLVVAKVEKGKSKKLKSVKELLGITIMERSSFEKNPIDFLEAKGYKEVKKDLIIKLPKYSLFELENGRKRMLASAGELQKGNELALPSKYVNFLYLASHYEKLKGSPEDNEQKQLFVEQHKHYLDEIIEQISEFSKRVILADANLDKVLSAYNKHRDKPIREQAENIIHLFTLTNLGAPAAFKYFDTTIDRKRYTSTKEVLDATLIHQSITGLYETRIDLSQLGGDSGGSSMSKTIKDLEEFAAEKLGYDIVFQESISMEPQEVEHLITTDEKSVLVNSTYDDNKEITISMISTPHPEYRPIALIIQDMEGEVQRKELGSGGSPKKKRKV

SEQ ID NO: 879 - protein, 1732 aa, unidentified
MSSDVVFCWSTGPSAGDTTLRRRIEPWEFKDSFDPHQLRKETRLLSEVWWGKSSRPWRESRQNATHHVEMNFIEKFTSERHLRPHVCCSITWFLSWSPCWECAKAIREFVSQHPKVRLVIYVARLYWHLDEQNRQGLRALVAGGVHVQIMSDSDYGYCWRNFVNYPPGQEAAWPRFLPVWTALYALELSCILLSLPPCLRISRRRQNQLTFFQVILKNCHYRAIPPLVLSAAGMMHPSVAWCWAESGTETPGTSESATPESDKKYSIGLAIGTNSVGWAVITDEYKVPSKKFKVLGNTDRHSIKKNLIGALLFDSGETAEATRLKRTARRRYTRRKNRICYLQEIFSNEMAKVDDSFFHRLEESFLVEEDKKHERHPIFGNIVDEVAYHEKYPTIYHLRKKLVDSTDKADLRLIYLALAHMIKFRGHFLIEGDLNPDNSDVDKLFIQLVQTYNQLFEENPINASGVDAKAILSARLSKSRRLENLIAQLPGEKKNGLFGNLIALSLGLTPNFKSNFDLAEDAKLQLSKDTYDDDLDNLLAQIGDQYADLFLAAKNLSDAILLSDILRVNTEITKAPLSASMIKRYDEHHQDLTLLKALVRQQLPEKYKEIFFDQSKNGYAGYIDGGASQEEFYKFIKPILEKMDGTEELLVKLNREDLLRKQRTFDNGSIPHQIHLGELHAILRRQEDFYPFLKDNREKIEKILTFRIPYYVGPLARGNSRFAWMTRKSEETITPWNFEEVVDKGASAQSFIERMTNFDKNLPNEKVLPKHSLLYEYFTVYNELTKVKYVTEGMRKPAFLSGEQKKAIVDLLFKTNRKVTVKQLKEDYFKKIECFDSVEISGVEDRFNASLGTYHDLLKIIKDKDFLDNEENEDILEDIVLTLTLFEDREMIEERLKTYAHLFDDKVMKQLKRRRYTGWGRLSRKLINGIRDKQSGKTILDFLKSDGFANRNFMQLIHDDSLTFKEDIQKAQVSGQGDSLHEHIANLAGSPAIKKGILQTVKVVDELVKVMGRHKPENIVIEMARENQTTQKGQKNSRERMKRIEEGIKELGSQILKEHPVENTQLQNEKLYLYYLQNGRDMYVDQELDINRLSDYDVDHIVPQSFLKDDSIDNKVLTRSDKNRGKSDNVPSEEVVKKMKNYWRQLLNAKLITQRKFDNLTKAERGGLSELDKAGFIKRQLVETRQITKHVAQILDSRMNTKYDENDKLIREVKVITLKSKLVSDFRKDFQFYKVREINNYHHAHDAYLNAVVGTALIKKYPKLESEFVYGDYKVYDVRKMIAKSEQEIGKATAKYFFYSNIMNFFKTEITLANGEIRKRPLIETNGETGEIVWDKGRDFATVRKVLSMPQVNIVKKTEVQTGGFSKESILPKRNSDKLIARKKDWDPKKYGGFDSPTVAYSVLVVAKVEKGKSKKLKSVKELLGITIMERSSFEKNPIDFLEAKGYKEVKKDLIIKLPKYSLFELENGRKRMLASAGELQKGNELALPSKYVNFLYLASHYEKLKGSPEDNEQKQLFVEQHKHYLDEIIEQISEFSKRVILADANLDKVLSAYNKHRDKPIREQAENIIHLFTLTNLGAPAAFKYFDTTIDRKRYTSTKEVLDATLIHQSITGLYETRIDLSQLGGDSGGSSMSKTIKDLEEFAAEKLGYDIVFQESISMEPQEVEHLITTDEKSVLVNSTYDDNKEITISMISTPHPEYRPIALIIQDMEGEVQRKELGSGGSPKKKRKV

SEQ ID NO: 880 - protein, 1716 aa, unidentified
MTTMRGPAAGDATLRRRIEPWDFQDFFDPRDLRRETCLLYEINWGGRHSVWRHTGKNTSNHVEVNFIEKFTSERYYSPSARCSIIWFLSWSPCWECSKAIIEFLHQHRNVTLFIYVARLFHHTDLRNRQGIRDLISSGVTIQIMTEPEYCYCWRYFVNYPPGSEVHWPRYPRQWMMLYVLELQCIILGLPSCVKILRRHQNQLTIFTLDLQNCHYQMIPPHILLATGLISGTETPGTSESATPESDKKYSIGLAIGTNSVGWAVITDEYKVPSKKFKVLGNTDRHSIKKNLIGALLFDSGETAEATRLKRTARRRYTRRKNRICYLQEIFSNEMAKVDDSFFHRLEESFLVEEDKKHERHPIFGNIVDEVAYHEKYPTIYHLRKKLVDSTDKADLRLIYLALAHMIKFRGHFLIEGDLNPDNSDVDKLFIQLVQTYNQLFEENPINASGVDAKAILSARLSKSRRLENLIAQLPGEKKNGLFGNLIALSLGLTPNFKSNFDLAEDAKLQLSKDTYDDDLDNLLAQIGDQYADLFLAAKNLSDAILLSDILRVNTEITKAPLSASMIKRYDEHHQDLTLLKALVRQQLPEKYKEIFFDQSKNGYAGYIDGGASQEEFYKFIKPILEKMDGTEELLVKLNREDLLRKQRTFDNGSIPHQIHLGELHAILRRQEDFYPFLKDNREKIEKILTFRIPYYVGPLARGNSRFAWMTRKSEETITPWNFEEVVDKGASAQSFIERMTNFDKNLPNEKVLPKHSLLYEYFTVYNELTKVKYVTEGMRKPAFLSGEQKKAIVDLLFKTNRKVTVKQLKEDYFKKIECFDSVEISGVEDRFNASLGTYHDLLKIIKDKDFLDNEENEDILEDIVLTLTLFEDREMIEERLKTYAHLFDDKVMKQLKRRRYTGWGRLSRKLINGIRDKQSGKTILDFLKSDGFANRNFMQLIHDDSLTFKEDIQKAQVSGQGDSLHEHIANLAGSPAIKKGILQTVKVVDELVKVMGRHKPENIVIEMARENQTTQKGQKNSRERMKRIEEGIKELGSQILKEHPVENTQLQNEKLYLYYLQNGRDMYVDQELDINRLSDYDVDHIVPQSFLKDDSIDNKVLTRSDKNRGKSDNVPSEEVVKKMKNYWRQLLNAKLITQRKFDNLTKAERGGLSELDKAGFIKRQLVETRQITKHVAQILDSRMNTKYDENDKLIREVKVITLKSKLVSDFRKDFQFYKVREINNYHHAHDAYLNAVVGTALIKKYPKLESEFVYGDYKVYDVRKMIAKSEQEIGKATAKYFFYSNIMNFFKTEITLANGEIRKRPLIETNGETGEIVWDKGRDFATVRKVLSMPQVNIVKKTEVQTGGFSKESILPKRNSDKLIARKKDWDPKKYGGFDSPTVAYSVLVVAKVEKGKSKKLKSVKELLGITIMERSSFEKNPIDFLEAKGYKEVKKDLIIKLPKYSLFELENGRKRMLASAGELQKGNELALPSKYVNFLYLASHYEKLKGSPEDNEQKQLFVEQHKHYLDEIIEQISEFSKRVILADANLDKVLSAYNKHRDKPIREQAENIIHLFTLTNLGAPAAFKYFDTTIDRKRYTSTKEVLDATLIHQSITGLYETRIDLSQLGGDSGGSSMSKTIKDLEEFAAEKLGYDIVFQESISMEPQEVEHLITTDEKSVLVNSTYDDNKEITISMISTPHPEYRPIALIIQDMEGEVQRKELGSGGSPKKKRKV

SEQ ID NO: 881 - protein, 1715 aa, unidentified
MSSQTGPAVVDPTLRRRIEPQDFEAFFDPRELRKETCLLYEISWGGRHNTWRHTSRNTDKHVEINFIKKLTSERSFRPSARCSITWFLSWSPCWECSKAITEFLSQHPNVTLFIYVARLYHHMDPGNRQGLRNLVCRGVTVQIMTEQEYCYCWKNFVNYPPSNEVYWPRFPNVWMKLYILELLCIILGLPPCLRILRRNQCQATLFTLVFQGCHFQRIPPPIFWATGMSGTETPGTSESATPESDKKYSIGLAIGTNSVGWAVITDEYKVPSKKFKVLGNTDRHSIKKNLIGALLFDSGETAEATRLKRTARRRYTRRKNRICYLQEIFSNEMAKVDDSFFHRLEESFLVEEDKKHERHPIFGNIVDEVAYHEKYPTIYHLRKKLVDSTDKADLRLIYLALAHMIKFRGHFLIEGDLNPDNSDVDKLFIQLVQTYNQLFEENPINASGVDAKAILSARLSKSRRLENLIAQLPGEKKNGLFGNLIALSLGLTPNFKSNFDLAEDAKLQLSKDTYDDDLDNLLAQIGDQYADLFLAAKNLSDAILLSDILRVNTEITKAPLSASMIKRYDEHHQDLTLLKALVRQQLPEKYKEIFFDQSKNGYAGYIDGGASQEEFYKFIKPILEKMDGTEELLVKLNREDLLRKQRTFDNGSIPHQIHLGELHAILRRQEDFYPFLKDNREKIEKILTFRIPYYVGPLARGNSRFAWMTRKSEETITPWNFEEVVDKGASAQSFIERMTNFDKNLPNEKVLPKHSLLYEYFTVYNELTKVKYVTEGMRKPAFLSGEQKKAIVDLLFKTNRKVTVKQLKEDYFKKIECFDSVEISGVEDRFNASLGTYHDLLKIIKDKDFLDNEENEDILEDIVLTLTLFEDREMIEERLKTYAHLFDDKVMKQLKRRRYTGWGRLSRKLINGIRDKQSGKTILDFLKSDGFANRNFMQLIHDDSLTFKEDIQKAQVSGQGDSLHEHIANLAGSPAIKKGILQTVKVVDELVKVMGRHKPENIVIEMARENQTTQKGQKNSRERMKRIEEGIKELGSQILKEHPVENTQLQNEKLYLYYLQNGRDMYVDQELDINRLSDYDVDHIVPQSFLKDDSIDNKVLTRSDKNRGKSDNVPSEEVVKKMKNYWRQLLNAKLITQRKFDNLTKAERGGLSELDKAGFIKRQLVETRQITKHVAQILDSRMNTKYDENDKLIREVKVITLKSKLVSDFRKDFQFYKVREINNYHHAHDAYLNAVVGTALIKKYPKLESEFVYGDYKVYDVRKMIAKSEQEIGKATAKYFFYSNIMNFFKTEITLANGEIRKRPLIETNGETGEIVWDKGRDFATVRKVLSMPQVNIVKKTEVQTGGFSKESILPKRNSDKLIARKKDWDPKKYGGFDSPTVAYSVLVVAKVEKGKSKKLKSVKELLGITIMERSSFEKNPIDFLEAKGYKEVKKDLIIKLPKYSLFELENGRKRMLASAGELQKGNELALPSKYVNFLYLASHYEKLKGSPEDNEQKQLFVEQHKHYLDEIIEQISEFSKRVILADANLDKVLSAYNKHRDKPIREQAENIIHLFTLTNLGAPAAFKYFDTTIDRKRYTSTKEVLDATLIHQSITGLYETRIDLSQLGGDSGGSSMSKTIKDLEEFAAEKLGYDIVFQESISMEPQEVEHLITTDEKSVLVNSTYDDNKEITISMISTPHPEYRPIALIIQDMEGEVQRKELGSGGSPKKKRKV

SEQ ID NO: 882 - protein, 1715 aa, unidentified
MSSETGPAVVDPTLRRRIEPQEFEVFFDPRELRKETCLLYEISWGGRRSIWRHTSRNTDKHVEINFIEKLTSERSFRPSARCSITWFLSWSPCGECSKAITEFLSQHPNVTLFIYVARLYHHMDPGNRQGLRNLICRGVTVQIMTEQEYCYCWKNFVNYPPSNEVYWPRFPNVWMRLYMLELLCIILGLPPCLRILRRNQRQGTLFTLVFQRCHYQRIPPPIVWARGMSGTETPGTSESATPESDKKYSIGLAIGTNSVGWAVITDEYKVPSKKFKVLGNTDRHSIKKNLIGALLFDSGETAEATRLKRTARRRYTRRKNRICYLQEIFSNEMAKVDDSFFHRLEESFLVEEDKKHERHPIFGNIVDEVAYHEKYPTIYHLRKKLVDSTDKADLRLIYLALAHMIKFRGHFLIEGDLNPDNSDVDKLFIQLVQTYNQLFEENPINASGVDAKAILSARLSKSRRLENLIAQLPGEKKNGLFGNLIALSLGLTPNFKSNFDLAEDAKLQLSKDTYDDDLDNLLAQIGDQYADLFLAAKNLSDAILLSDILRVNTEITKAPLSASMIKRYDEHHQDLTLLKALVRQQLPEKYKEIFFDQSKNGYAGYIDGGASQEEFYKFIKPILEKMDGTEELLVKLNREDLLRKQRTFDNGSIPHQIHLGELHAILRRQEDFYPFLKDNREKIEKILTFRIPYYVGPLARGNSRFAWMTRKSEETITPWNFEEVVDKGASAQSFIERMTNFDKNLPNEKVLPKHSLLYEYFTVYNELTKVKYVTEGMRKPAFLSGEQKKAIVDLLFKTNRKVTVKQLKEDYFKKIECFDSVEISGVEDRFNASLGTYHDLLKIIKDKDFLDNEENEDILEDIVLTLTLFEDREMIEERLKTYAHLFDDKVMKQLKRRRYTGWGRLSRKLINGIRDKQSGKTILDFLKSDGFANRNFMQLIHDDSLTFKEDIQKAQVSGQGDSLHEHIANLAGSPAIKKGILQTVKVVDELVKVMGRHKPENIVIEMARENQTTQKGQKNSRERMKRIEEGIKELGSQILKEHPVENTQLQNEKLYLYYLQNGRDMYVDQELDINRLSDYDVDHIVPQSFLKDDSIDNKVLTRSDKNRGKSDNVPSEEVVKKMKNYWRQLLNAKLITQRKFDNLTKAERGGLSELDKAGFIKRQLVETRQITKHVAQILDSRMNTKYDENDKLIREVKVITLKSKLVSDFRKDFQFYKVREINNYHHAHDAYLNAVVGTALIKKYPKLESEFVYGDYKVYDVRKMIAKSEQEIGKATAKYFFYSNIMNFFKTEITLANGEIRKRPLIETNGETGEIVWDKGRDFATVRKVLSMPQVNIVKKTEVQTGGFSKESILPKRNSDKLIARKKDWDPKKYGGFDSPTVAYSVLVVAKVEKGKSKKLKSVKELLGITIMERSSFEKNPIDFLEAKGYKEVKKDLIIKLPKYSLFELENGRKRMLASAGELQKGNELALPSKYVNFLYLASHYEKLKGSPEDNEQKQLFVEQHKHYLDEIIEQISEFSKRVILADANLDKVLSAYNKHRDKPIREQAENIIHLFTLTNLGAPAAFKYFDTTIDRKRYTSTKEVLDATLIHQSITGLYETRIDLSQLGGDSGGSSMSKTIKDLEEFAAEKLGYDIVFQESISMEPQEVEHLITTDEKSVLVNSTYDDNKEITISMISTPHPEYRPIALIIQDMEGEVQRKELGSGGSPKKKRKV

SEQ ID NO: 883 - protein, 1723 aa, unidentified
MTSEKGPSTGDATLRRRIEPWEFEVFFNPGELRKETCMFYEIKWGTSQKIWRNSSKNTTNHVEVNFIEKFTAERHFCPSISCSITWFLSWSPCWECSKAIREFLSQHPNTTLVIYTARLFQHMDQQNRQGLRDLINSGVTVQIMTISEYCYCWRNFVNYSPKEETHWPKYQPLLMMLYALELHCIILSLPPCLKISRRYQKQLTFFNLILQNCHYQTIPPHILLSLGLIQPSVTWRSGTETPGTSESATPESDKKYSIGLAIGTNSVGWAVITDEYKVPSKKFKVLGNTDRHSIKKNLIGALLFDSGETAEATRLKRTARRRYTRRKNRICYLQEIFSNEMAKVDDSFFHRLEESFLVEEDKKHERHPIFGNIVDEVAYHEKYPTIYHLRKKLVDSTDKADLRLIYLALAHMIKFRGHFLIEGDLNPDNSDVDKLFIQLVQTYNQLFEENPINASGVDAKAILSARLSKSRRLENLIAQLPGEKKNGLFGNLIALSLGLTPNFKSNFDLAEDAKLQLSKDTYDDDLDNLLAQIGDQYADLFLAAKNLSDAILLSDILRVNTEITKAPLSASMIKRYDEHHQDLTLLKALVRQQLPEKYKEIFFDQSKNGYAGYIDGGASQEEFYKFIKPILEKMDGTEELLVKLNREDLLRKQRTFDNGSIPHQIHLGELHAILRRQEDFYPFLKDNREKIEKILTFRIPYYVGPLARGNSRFAWMTRKSEETITPWNFEEVVDKGASAQSFIERMTNFDKNLPNEKVLPKHSLLYEYFTVYNELTKVKYVTEGMRKPAFLSGEQKKAIVDLLFKTNRKVTVKQLKEDYFKKIECFDSVEISGVEDRFNASLGTYHDLLKIIKDKDFLDNEENEDILEDIVLTLTLFEDREMIEERLKTYAHLFDDKVMKQLKRRRYTGWGRLSRKLINGIRDKQSGKTILDFLKSDGFANRNFMQLIHDDSLTFKEDIQKAQVSGQGDSLHEHIANLAGSPAIKKGILQTVKVVDELVKVMGRHKPENIVIEMARENQTTQKGQKNSRERMKRIEEGIKELGSQILKEHPVENTQLQNEKLYLYYLQNGRDMYVDQELDINRLSDYDVDHIVPQSFLKDDSIDNKVLTRSDKNRGKSDNVPSEEVVKKMKNYWRQLLNAKLITQRKFDNLTKAERGGLSELDKAGFIKRQLVETRQITKHVAQILDSRMNTKYDENDKLIREVKVITLKSKLVSDFRKDFQFYKVREINNYHHAHDAYLNAVVGTALIKKYPKLESEFVYGDYKVYDVRKMIAKSEQEIGKATAKYFFYSNIMNFFKTEITLANGEIRKRPLIETNGETGEIVWDKGRDFATVRKVLSMPQVNIVKKTEVQTGGFSKESILPKRNSDKLIARKKDWDPKKYGGFDSPTVAYSVLVVAKVEKGKSKKLKSVKELLGITIMERSSFEKNPIDFLEAKGYKEVKKDLIIKLPKYSLFELENGRKRMLASAGELQKGNELALPSKYVNFLYLASHYEKLKGSPEDNEQKQLFVEQHKHYLDEIIEQISEFSKRVILADANLDKVLSAYNKHRDKPIREQAENIIHLFTLTNLGAPAAFKYFDTTIDRKRYTSTKEVLDATLIHQSITGLYETRIDLSQLGGDSGGSSMSKTIKDLEEFAAEKLGYDIVFQESISMEPQEVEHLITTDEKSVLVNSTYDDNKEITISMISTPHPEYRPIALIIQDMEGEVQRKELGSGGSPKKKRKV

SEQ ID NO: 884 - protein, 1715 aa, unidentified
MSSETGPAVVDPTLRRRIEPQEFEVFFDPRELRKETCLLYEISWGGRRSIWRHTSRNTDKHVEINFIEKLTSQRSFRPSARCSITWFLSWSPCGECSKAITEFLSQHPNVTLFIYVARLYHHMDPGNRQGLRNLICRGVTVQIMTEQEYCYCWKNFVNYPPSNEVYWPRFPNVWMRLYMLELLCIILGLPPCLRILRRNQRHDTLFTLVFQRCHYQRIPPPIIWARGMSGTETPGTSESATPESDKKYSIGLAIGTNSVGWAVITDEYKVPSKKFKVLGNTDRHSIKKNLIGALLFDSGETAEATRLKRTARRRYTRRKNRICYLQEIFSNEMAKVDDSFFHRLEESFLVEEDKKHERHPIFGNIVDEVAYHEKYPTIYHLRKKLVDSTDKADLRLIYLALAHMIKFRGHFLIEGDLNPDNSDVDKLFIQLVQTYNQLFEENPINASGVDAKAILSARLSKSRRLENLIAQLPGEKKNGLFGNLIALSLGLTPNFKSNFDLAEDAKLQLSKDTYDDDLDNLLAQIGDQYADLFLAAKNLSDAILLSDILRVNTEITKAPLSASMIKRYDEHHQDLTLLKALVRQQLPEKYKEIFFDQSKNGYAGYIDGGASQEEFYKFIKPILEKMDGTEELLVKLNREDLLRKQRTFDNGSIPHQIHLGELHAILRRQEDFYPFLKDNREKIEKILTFRIPYYVGPLARGNSRFAWMTRKSEETITPWNFEEVVDKGASAQSFIERMTNFDKNLPNEKVLPKHSLLYEYFTVYNELTKVKYVTEGMRKPAFLSGEQKKAIVDLLFKTNRKVTVKQLKEDYFKKIECFDSVEISGVEDRFNASLGTYHDLLKIIKDKDFLDNEENEDILEDIVLTLTLFEDREMIEERLKTYAHLFDDKVMKQLKRRRYTGWGRLSRKLINGIRDKQSGKTILDFLKSDGFANRNFMQLIHDDSLTFKEDIQKAQVSGQGDSLHEHIANLAGSPAIKKGILQTVKVVDELVKVMGRHKPENIVIEMARENQTTQKGQKNSRERMKRIEEGIKELGSQILKEHPVENTQLQNEKLYLYYLQNGRDMYVDQELDINRLSDYDVDHIVPQSFLKDDSIDNKVLTRSDKNRGKSDNVPSEEVVKKMKNYWRQLLNAKLITQRKFDNLTKAERGGLSELDKAGFIKRQLVETRQITKHVAQILDSRMNTKYDENDKLIREVKVITLKSKLVSDFRKDFQFYKVREINNYHHAHDAYLNAVVGTALIKKYPKLESEFVYGDYKVYDVRKMIAKSEQEIGKATAKYFFYSNIMNFFKTEITLANGEIRKRPLIETNGETGEIVWDKGRDFATVRKVLSMPQVNIVKKTEVQTGGFSKESILPKRNSDKLIARKKDWDPKKYGGFDSPTVAYSVLVVAKVEKGKSKKLKSVKELLGITIMERSSFEKNPIDFLEAKGYKEVKKDLIIKLPKYSLFELENGRKRMLASAGELQKGNELALPSKYVNFLYLASHYEKLKGSPEDNEQKQLFVEQHKHYLDEIIEQISEFSKRVILADANLDKVLSAYNKHRDKPIREQAENIIHLFTLTNLGAPAAFKYFDTTIDRKRYTSTKEVLDATLIHQSITGLYETRIDLSQLGGDSGGSSMSKTIKDLEEFAAEKLGYDIVFQESISMEPQEVEHLITTDEKSVLVNSTYDDNKEITISMISTPHPEYRPIALIIQDMEGEVQRKELGSGGSPKKKRKV

SEQ ID NO: 885 - protein, 1666 aa, unidentified
MRKETGMYISKAALKHNFNPHETPKDTYLLCKLQWGETGTPWIHWVRNERYHHAESYFLEKIFKMRRSSNYVKCNITWYLSWSPCADCCHKILNFLKRHSNVNIDIYVARLYYIEDEEIRQCLKNLVSLAEVTIAVMKIEDYIYCQKKFIQGGDDDDSWTVSFQPEISKNRLKLKDVFESGTETPGTSESATPESDKKYSIGLAIGTNSVGWAVITDEYKVPSKKFKVLGNTDRHSIKKNLIGALLFDSGETAEATRLKRTARRRYTRRKNRICYLQEIFSNEMAKVDDSFFHRLEESFLVEEDKKHERHPIFGNIVDEVAYHEKYPTIYHLRKKLVDSTDKADLRLIYLALAHMIKFRGHFLIEGDLNPDNSDVDKLFIQLVQTYNQLFEENPINASGVDAKAILSARLSKSRRLENLIAQLPGEKKNGLFGNLIALSLGLTPNFKSNFDLAEDAKLQLSKDTYDDDLDNLLAQIGDQYADLFLAAKNLSDAILLSDILRVNTEITKAPLSASMIKRYDEHHQDLTLLKALVRQQLPEKYKEIFFDQSKNGYAGYIDGGASQEEFYKFIKPILEKMDGTEELLVKLNREDLLRKQRTFDNGSIPHQIHLGELHAILRRQEDFYPFLKDNREKIEKILTFRIPYYVGPLARGNSRFAWMTRKSEETITPWNFEEVVDKGASAQSFIERMTNFDKNLPNEKVLPKHSLLYEYFTVYNELTKVKYVTEGMRKPAFLSGEQKKAIVDLLFKTNRKVTVKQLKEDYFKKIECFDSVEISGVEDRFNASLGTYHDLLKIIKDKDFLDNEENEDILEDIVLTLTLFEDREMIEERLKTYAHLFDDKVMKQLKRRRYTGWGRLSRKLINGIRDKQSGKTILDFLKSDGFANRNFMQLIHDDSLTFKEDIQKAQVSGQGDSLHEHIANLAGSPAIKKGILQTVKVVDELVKVMGRHKPENIVIEMARENQTTQKGQKNSRERMKRIEEGIKELGSQILKEHPVENTQLQNEKLYLYYLQNGRDMYVDQELDINRLSDYDVDHIVPQSFLKDDSIDNKVLTRSDKNRGKSDNVPSEEVVKKMKNYWRQLLNAKLITQRKFDNLTKAERGGLSELDKAGFIKRQLVETRQITKHVAQILDSRMNTKYDENDKLIREVKVITLKSKLVSDFRKDFQFYKVREINNYHHAHDAYLNAVVGTALIKKYPKLESEFVYGDYKVYDVRKMIAKSEQEIGKATAKYFFYSNIMNFFKTEITLANGEIRKRPLIETNGETGEIVWDKGRDFATVRKVLSMPQVNIVKKTEVQTGGFSKESILPKRNSDKLIARKKDWDPKKYGGFDSPTVAYSVLVVAKVEKGKSKKLKSVKELLGITIMERSSFEKNPIDFLEAKGYKEVKKDLIIKLPKYSLFELENGRKRMLASAGELQKGNELALPSKYVNFLYLASHYEKLKGSPEDNEQKQLFVEQHKHYLDEIIEQISEFSKRVILADANLDKVLSAYNKHRDKPIREQAENIIHLFTLTNLGAPAAFKYFDTTIDRKRYTSTKEVLDATLIHQSITGLYETRIDLSQLGGDSGGSSMSKTIKDLEEFAAEKLGYDIVFQESISMEPQEVEHLITTDEKSVLVNSTYDDNKEITISMISTPHPEYRPIALIIQDMEGEVQRKELGSGGSPKKKRKV

SEQ ID NO: 886 - protein, 1670 aa, unidentified
MYKKKLRGMYMSKKAFKYHFDPRESPRATYLLCVIQWGCNGLPWIHWVKNGRSHAERYFLQKVFKMRRSNNNINCSITLYLSWSPCRNCCYEMQYFLKKHPNVNICIYLARLYYTEDEEICKALKDLSEKKVIISVMKIEDYIYCWKTFVSGNAAAGSWFKDFESQINKNHFQLKRILEVSPLSGTETPGTSESATPESDKKYSIGLAIGTNSVGWAVITDEYKVPSKKFKVLGNTDRHSIKKNLIGALLFDSGETAEATRLKRTARRRYTRRKNRICYLQEIFSNEMAKVDDSFFHRLEESFLVEEDKKHERHPIFGNIVDEVAYHEKYPTIYHLRKKLVDSTDKADLRLIYLALAHMIKFRGHFLIEGDLNPDNSDVDKLFIQLVQTYNQLFEENPINASGVDAKAILSARLSKSRRLENLIAQLPGEKKNGLFGNLIALSLGLTPNFKSNFDLAEDAKLQLSKDTYDDDLDNLLAQIGDQYADLFLAAKNLSDAILLSDILRVNTEITKAPLSASMIKRYDEHHQDLTLLKALVRQQLPEKYKEIFFDQSKNGYAGYIDGGASQEEFYKFIKPILEKMDGTEELLVKLNREDLLRKQRTFDNGSIPHQIHLGELHAILRRQEDFYPFLKDNREKIEKILTFRIPYYVGPLARGNSRFAWMTRKSEETITPWNFEEVVDKGASAQSFIERMTNFDKNLPNEKVLPKHSLLYEYFTVYNELTKVKYVTEGMRKPAFLSGEQKKAIVDLLFKTNRKVTVKQLKEDYFKKIECFDSVEISGVEDRFNASLGTYHDLLKIIKDKDFLDNEENEDILEDIVLTLTLFEDREMIEERLKTYAHLFDDKVMKQLKRRRYTGWGRLSRKLINGIRDKQSGKTILDFLKSDGFANRNFMQLIHDDSLTFKEDIQKAQVSGQGDSLHEHIANLAGSPAIKKGILQTVKVVDELVKVMGRHKPENIVIEMARENQTTQKGQKNSRERMKRIEEGIKELGSQILKEHPVENTQLQNEKLYLYYLQNGRDMYVDQELDINRLSDYDVDHIVPQSFLKDDSIDNKVLTRSDKNRGKSDNVPSEEVVKKMKNYWRQLLNAKLITQRKFDNLTKAERGGLSELDKAGFIKRQLVETRQITKHVAQILDSRMNTKYDENDKLIREVKVITLKSKLVSDFRKDFQFYKVREINNYHHAHDAYLNAVVGTALIKKYPKLESEFVYGDYKVYDVRKMIAKSEQEIGKATAKYFFYSNIMNFFKTEITLANGEIRKRPLIETNGETGEIVWDKGRDFATVRKVLSMPQVNIVKKTEVQTGGFSKESILPKRNSDKLIARKKDWDPKKYGGFDSPTVAYSVLVVAKVEKGKSKKLKSVKELLGITIMERSSFEKNPIDFLEAKGYKEVKKDLIIKLPKYSLFELENGRKRMLASAGELQKGNELALPSKYVNFLYLASHYEKLKGSPEDNEQKQLFVEQHKHYLDEIIEQISEFSKRVILADANLDKVLSAYNKHRDKPIREQAENIIHLFTLTNLGAPAAFKYFDTTIDRKRYTSTKEVLDATLIHQSITGLYETRIDLSQLGGDSGGSSMSKTIKDLEEFAAEKLGYDIVFQESISMEPQEVEHLITTDEKSVLVNSTYDDNKEITISMISTPHPEYRPIALIIQDMEGEVQRKELGSGGSPKKKRKV

SEQ ID NO: 887 - protein, 1680 aa, unidentified
MAAVSARGPSSRENNQGWKMQPEDFQRNYSPRQNGRVYLLYEIRWRSSSIWRNWCSNNPEQHAEVNFLENHFNNQPQTPCCITWFLSASPCGNCCRRILKFLRSHPNVTLVICAAKLFRHLDIRNRRGLRSLMMNGVAIRIMNLEDYRYCWRNFVAHQPGQDDYWPQNVTLYFILNSIELLHIFLDLPPFLANSGTETPGTSESATPESDKKYSIGLAIGTNSVGWAVITDEYKVPSKKFKVLGNTDRHSIKKNLIGALLFDSGETAEATRLKRTARRRYTRRKNRICYLQEIFSNEMAKVDDSFFHRLEESFLVEEDKKHERHPIFGNIVDEVAYHEKYPTIYHLRKKLVDSTDKADLRLIYLALAHMIKFRGHFLIEGDLNPDNSDVDKLFIQLVQTYNQLFEENPINASGVDAKAILSARLSKSRRLENLIAQLPGEKKNGLFGNLIALSLGLTPNFKSNFDLAEDAKLQLSKDTYDDDLDNLLAQIGDQYADLFLAAKNLSDAILLSDILRVNTEITKAPLSASMIKRYDEHHQDLTLLKALVRQQLPEKYKEIFFDQSKNGYAGYIDGGASQEEFYKFIKPILEKMDGTEELLVKLNREDLLRKQRTFDNGSIPHQIHLGELHAILRRQEDFYPFLKDNREKIEKILTFRIPYYVGPLARGNSRFAWMTRKSEETITPWNFEEVVDKGASAQSFIERMTNFDKNLPNEKVLPKHSLLYEYFTVYNELTKVKYVTEGMRKPAFLSGEQKKAIVDLLFKTNRKVTVKQLKEDYFKKIECFDSVEISGVEDRFNASLGTYHDLLKIIKDKDFLDNEENEDILEDIVLTLTLFEDREMIEERLKTYAHLFDDKVMKQLKRRRYTGWGRLSRKLINGIRDKQSGKTILDFLKSDGFANRNFMQLIHDDSLTFKEDIQKAQVSGQGDSLHEHIANLAGSPAIKKGILQTVKVVDELVKVMGRHKPENIVIEMARENQTTQKGQKNSRERMKRIEEGIKELGSQILKEHPVENTQLQNEKLYLYYLQNGRDMYVDQELDINRLSDYDVDHIVPQSFLKDDSIDNKVLTRSDKNRGKSDNVPSEEVVKKMKNYWRQLLNAKLITQRKFDNLTKAERGGLSELDKAGFIKRQLVETRQITKHVAQILDSRMNTKYDENDKLIREVKVITLKSKLVSDFRKDFQFYKVREINNYHHAHDAYLNAVVGTALIKKYPKLESEFVYGDYKVYDVRKMIAKSEQEIGKATAKYFFYSNIMNFFKTEITLANGEIRKRPLIETNGETGEIVWDKGRDFATVRKVLSMPQVNIVKKTEVQTGGFSKESILPKRNSDKLIARKKDWDPKKYGGFDSPTVAYSVLVVAKVEKGKSKKLKSVKELLGITIMERSSFEKNPIDFLEAKGYKEVKKDLIIKLPKYSLFELENGRKRMLASAGELQKGNELALPSKYVNFLYLASHYEKLKGSPEDNEQKQLFVEQHKHYLDEIIEQISEFSKRVILADANLDKVLSAYNKHRDKPIREQAENIIHLFTLTNLGAPAAFKYFDTTIDRKRYTSTKEVLDATLIHQSITGLYETRIDLSQLGGDSGGSSMSKTIKDLEEFAAEKLGYDIVFQESISMEPQEVEHLITTDEKSVLVNSTYDDNKEITISMISTPHPEYRPIALIIQDMEGEVQRKELGSGGSPKKKRKV

SEQ ID NO: 888 - protein, 1861 aa, unidentified
MYRRKMRGMYISKRALRIHFDPCKFPKETYLLCELQWRGSTKFWQHWVRNDHDYEDCHAEQYFLDEVFEPRSYNICDMTWYLSWSPCRECCDIIRDFLEEQPNVNIDIRVARLYYTNIPRYRDGLRELHSLEGVTIKAMEAEDYNYCWETFIQPGVNYYFSPNNFKSEIQRNRTKLEDILQGLHLYARITVLLVLFFRWKMQPRDFQRNYSPRQNGRVYLLYEIRWRRGSIWRNWCSNNHEQHAEVNFLENHFSVRPQTPCSITWFLSTSPCGKCSRRILEFLRSHPNVTLVIYAAKLFRHHDNRNRQGLRNLIMNGVTLRIMNLEDYRYCWRNFVAYQTGEDDYWPQNVTLYFLLNSTELLHIFWGLPPFLANSGTETPGTSESATPESDKKYSIGLAIGTNSVGWAVITDEYKVPSKKFKVLGNTDRHSIKKNLIGALLFDSGETAEATRLKRTARRRYTRRKNRICYLQEIFSNEMAKVDDSFFHRLEESFLVEEDKKHERHPIFGNIVDEVAYHEKYPTIYHLRKKLVDSTDKADLRLIYLALAHMIKFRGHFLIEGDLNPDNSDVDKLFIQLVQTYNQLFEENPINASGVDAKAILSARLSKSRRLENLIAQLPGEKKNGLFGNLIALSLGLTPNFKSNFDLAEDAKLQLSKDTYDDDLDNLLAQIGDQYADLFLAAKNLSDAILLSDILRVNTEITKAPLSASMIKRYDEHHQDLTLLKALVRQQLPEKYKEIFFDQSKNGYAGYIDGGASQEEFYKFIKPILEKMDGTEELLVKLNREDLLRKQRTFDNGSIPHQIHLGELHAILRRQEDFYPFLKDNREKIEKILTFRIPYYVGPLARGNSRFAWMTRKSEETITPWNFEEVVDKGASAQSFIERMTNFDKNLPNEKVLPKHSLLYEYFTVYNELTKVKYVTEGMRKPAFLSGEQKKAIVDLLFKTNRKVTVKQLKEDYFKKIECFDSVEISGVEDRFNASLGTYHDLLKIIKDKDFLDNEENEDILEDIVLTLTLFEDREMIEERLKTYAHLFDDKVMKQLKRRRYTGWGRLSRKLINGIRDKQSGKTILDFLKSDGFANRNFMQLIHDDSLTFKEDIQKAQVSGQGDSLHEHIANLAGSPAIKKGILQTVKVVDELVKVMGRHKPENIVIEMARENQTTQKGQKNSRERMKRIEEGIKELGSQILKEHPVENTQLQNEKLYLYYLQNGRDMYVDQELDINRLSDYDVDHIVPQSFLKDDSIDNKVLTRSDKNRGKSDNVPSEEVVKKMKNYWRQLLNAKLITQRKFDNLTKAERGGLSELDKAGFIKRQLVETRQITKHVAQILDSRMNTKYDENDKLIREVKVITLKSKLVSDFRKDFQFYKVREINNYHHAHDAYLNAVVGTALIKKYPKLESEFVYGDYKVYDVRKMIAKSEQEIGKATAKYFFYSNIMNFFKTEITLANGEIRKRPLIETNGETGEIVWDKGRDFATVRKVLSMPQVNIVKKTEVQTGGFSKESILPKRNSDKLIARKKDWDPKKYGGFDSPTVAYSVLVVAKVEKGKSKKLKSVKELLGITIMERSSFEKNPIDFLEAKGYKEVKKDLIIKLPKYSLFELENGRKRMLASAGELQKGNELALPSKYVNFLYLASHYEKLKGSPEDNEQKQLFVEQHKHYLDEIIEQISEFSKRVILADANLDKVLSAYNKHRDKPIREQAENIIHLFTLTNLGAPAAFKYFDTTIDRKRYTSTKEVLDATLIHQSITGLYETRIDLSQLGGDSGGSSMSKTIKDLEEFAAEKLGYDIVFQESISMEPQEVEHLITTDEKSVLVNSTYDDNKEITISMISTPHPEYRPIALIIQDMEGEVQRKELGSGGSPKKKRKV

SEQ ID NO: 889 - protein, 1692 aa, unidentified
MERSSGRDWLDECCPRGCKYTSNYRGPMKGLFQKAFYFHFENLHYADHRRKTFLCFEVTRLQDNKFRKGMFINQVGPYRLHAELRFLSWFHDSWLCPYASYEVTWYMSWSPCEECMEELAAFLANHRNVTLTIYVARLYYYQEPTCGEGLQALLNEGASVNIMFFRDFLDCWRRFVYNGNEYFEPWPHLHQNSLKYFHILEELLESGTETPGTSESATPESDKKYSIGLAIGTNSVGWAVITDEYKVPSKKFKVLGNTDRHSIKKNLIGALLFDSGETAEATRLKRTARRRYTRRKNRICYLQEIFSNEMAKVDDSFFHRLEESFLVEEDKKHERHPIFGNIVDEVAYHEKYPTIYHLRKKLVDSTDKADLRLIYLALAHMIKFRGHFLIEGDLNPDNSDVDKLFIQLVQTYNQLFEENPINASGVDAKAILSARLSKSRRLENLIAQLPGEKKNGLFGNLIALSLGLTPNFKSNFDLAEDAKLQLSKDTYDDDLDNLLAQIGDQYADLFLAAKNLSDAILLSDILRVNTEITKAPLSASMIKRYDEHHQDLTLLKALVRQQLPEKYKEIFFDQSKNGYAGYIDGGASQEEFYKFIKPILEKMDGTEELLVKLNREDLLRKQRTFDNGSIPHQIHLGELHAILRRQEDFYPFLKDNREKIEKILTFRIPYYVGPLARGNSRFAWMTRKSEETITPWNFEEVVDKGASAQSFIERMTNFDKNLPNEKVLPKHSLLYEYFTVYNELTKVKYVTEGMRKPAFLSGEQKKAIVDLLFKTNRKVTVKQLKEDYFKKIECFDSVEISGVEDRFNASLGTYHDLLKIIKDKDFLDNEENEDILEDIVLTLTLFEDREMIEERLKTYAHLFDDKVMKQLKRRRYTGWGRLSRKLINGIRDKQSGKTILDFLKSDGFANRNFMQLIHDDSLTFKEDIQKAQVSGQGDSLHEHIANLAGSPAIKKGILQTVKVVDELVKVMGRHKPENIVIEMARENQTTQKGQKNSRERMKRIEEGIKELGSQILKEHPVENTQLQNEKLYLYYLQNGRDMYVDQELDINRLSDYDVDHIVPQSFLKDDSIDNKVLTRSDKNRGKSDNVPSEEVVKKMKNYWRQLLNAKLITQRKFDNLTKAERGGLSELDKAGFIKRQLVETRQITKHVAQILDSRMNTKYDENDKLIREVKVITLKSKLVSDFRKDFQFYKVREINNYHHAHDAYLNAVVGTALIKKYPKLESEFVYGDYKVYDVRKMIAKSEQEIGKATAKYFFYSNIMNFFKTEITLANGEIRKRPLIETNGETGEIVWDKGRDFATVRKVLSMPQVNIVKKTEVQTGGFSKESILPKRNSDKLIARKKDWDPKKYGGFDSPTVAYSVLVVAKVEKGKSKKLKSVKELLGITIMERSSFEKNPIDFLEAKGYKEVKKDLIIKLPKYSLFELENGRKRMLASAGELQKGNELALPSKYVNFLYLASHYEKLKGSPEDNEQKQLFVEQHKHYLDEIIEQISEFSKRVILADANLDKVLSAYNKHRDKPIREQAENIIHLFTLTNLGAPAAFKYFDTTIDRKRYTSTKEVLDATLIHQSITGLYETRIDLSQLGGDSGGSSMSKTIKDLEEFAAEKLGYDIVFQESISMEPQEVEHLITTDEKSVLVNSTYDDNKEITISMISTPHPEYRPIALIIQDMEGEVQRKELGSGGSPKKKRKV

SEQ ID NO: 890 - protein, 1613 aa, unidentified
MTFLRMDIPDGPLAGRPVRSRMDGVHPVHGRVLALQRAAGNAATTSALGTVQRSVVDEIARMKPDQLVVALQELNPKAAATNLWVTVDGKPVTELISRPAGFESLWPIQSGRGPHAEERFAQGVMPLLAARQPRYILLEITKSPCPSCTALLSQLVGEHPGTRFELHMLGLYPGAGEAEGERGAATRPEDLAELERKLQAKLLDLRAVIDRLTDEQWRKRFKYPKHTKIPIGTRIAALKFARSVHTTMVEARLKLGERQDQTAYGAKLKDLEDKFAELAAFLTAKKADATASARHEPYPAHETGRPTPAAETVTDLDRWTAIKAECPDLQLSEQTYGEYFLYSSHRAFTWFYVHNSLPESGTETPGTSESATPESMSTDMKNYRIGVAVGDRSVGLAAIEFDDDGLPIQKLALVTFRHDGGLDPTKNKTPMSRKETRGIARRTMRMNRERKRRLRNLDNVLENLGYSVPEGPEPETYEAWTSRALLASIKLASADELNEHLVRAVRHMARHRGWANPWWSLDQLEKASQEPSETFEIILARARELFGEKVPANPTLGMLGALAANNEVLLRPRDEKKRKTGYVRGTPLMFAQVRQGDQLAELRRICEVQGIEDQYEALRLGVFDHKHPYVPKERVGKDPLNPSTNRTIRASLEFQEFRILDSVANLRVRIGSRAKRELTEAEYDAAVEFLMDYADKEQPSWADVAEKIGVPGNRLVAPVLEDVQQKTAPYDRSSAAFEKAMGKKTEARQWWESTDDDQLRSLLIAFLVDATNDTEEAAAEAGLSELYKSWPAEEREALSNIDFEKGRVAYSQETLSKLSEYMHEYRVGLHEARKAVFGVDDTWRPPLDKLEEPTGQPAVDRVLTILRRFVLDCERQWGRPRAITVEHTRTGLMGPTQRQKILNEQKKNRADNERIRDELRESGVDNPSRAEVRRHLIVQEQECQCLYCGTMITTTTSELDHIVPRAGGGSSRRENLAAVCRACNAKKKRELFYAWAGPVKSQETIERVRQLKAFKDSKKAKMFKNQIRRLNQTEADEPIDERSLASTSYAAVAVRERLEQHFNEGLALDDKSRVVLDVYAGAVTRESRRAGGIDERILLRGERDKNRFDVRHHAVDAAVMTLLNRSVALTLEQRSQLRRTFYEQGLDKLDRNQLKPEEDWRDFTGLAPASQEKFLEWRKAATILGDLLAEAIEDDSIAVVSPLRLRPQNGSVHLETISAVKKQTLGSDWPADAVKRIVDPEIYLAMKDALGKLKELPEDSARSLELPDGRFVEADDEVLFFPENAASILTPRGVAEIGGSIHHARLYGWLTKKGELKVGMLRVYGAEFPWLMRESGSRNVLSMPIHRGSQSFRDMQDTTRKAVESGEAVEFAWITQNDELEFDPDDYIAHGGKDELRQFLGFMPECRWRVDGFKKNYQIRIRPAMLSREQLPSDIQRRLESKTLTKNESLLLKALDTGLVVAIGGLLPLETLKVIRRNNLGFPRWRGNGNLPTSFEVRSSALRALGVEGSGGSSMSKTIKDLEEFAAEKLGYDIVFQESISMEPQEVEHLITTDEKSVLVNSTYDDNKEITISMISTPHPEYRPIALIIQDMEGEVQRKELGSGGSPKKKRKV

SEQ ID NO: 891 - protein, 1490 aa, unidentified
MASETGPSAGDPTLRRRIEPWEFEVFFDPRELRRETCLLYEIQWGTSHRRWRKSGKNTTNHAEVNFIEKLTSERQFCPSVRCSITWFLSWSPCWECSQAIQEFLSQHPNVTLVIYVARLYYHMDQRNRQGLRDLVNSGVTIQIMSVPEYCYCWRNFVNFPPGQEAHWPRYQPQWMALYELELHCIILSLPPCLKISRRCQKQLTFFGLTLQNCHYQAIPPHILLATGLVLPFVPWRSGTETPGTSESATPESMSTDMKNYRIGVAVGDRSVGLAAIEFDDDGLPIQKLALVTFRHDGGLDPTKNKTPMSRKETRGIARRTMRMNRERKRRLRNLDNVLENLGYSVPEGPEPETYEAWTSRALLASIKLASADELNEHLVRAVRHMARHRGWANPWWSLDQLEKASQEPSETFEIILARARELFGEKVPANPTLGMLGALAANNEVLLRPRDEKKRKTGYVRGTPLMFAQVRQGDQLAELRRICEVQGIEDQYEALRLGVFDHKHPYVPKERVGKDPLNPSTNRTIRASLEFQEFRILDSVANLRVRIGSRAKRELTEAEYDAAVEFLMDYADKEQPSWADVAEKIGVPGNRLVAPVLEDVQQKTAPYDRSSAAFEKAMGKKTEARQWWESTDDDQLRSLLIAFLVDATNDTEEAAAEAGLSELYKSWPAEEREALSNIDFEKGRVAYSQETLSKLSEYMHEYRVGLHEARKAVFGVDDTWRPPLDKLEEPTGQPAVDRVLTILRRFVLDCERQWGRPRAITVEHTRTGLMGPTQRQKILNEQKKNRADNERIRDELRESGVDNPSRAEVRRHLIVQEQECQCLYCGTMITTTTSELDHIVPRAGGGSSRRENLAAVCRACNAKKKRELFYAWAGPVKSQETIERVRQLKAFKDSKKAKMFKNQIRRLNQTEADEPIDERSLASTSYAAVAVRERLEQHFNEGLALDDKSRVVLDVYAGAVTRESRRAGGIDERILLRGERDKNRFDVRHHAVDAAVMTLLNRSVALTLEQRSQLRRTFYEQGLDKLDRNQLKPEEDWRDFTGLAPASQEKFLEWRKAATILGDLLAEAIEDDSIAVVSPLRLRPQNGSVHLETISAVKKQTLGSDWPADAVKRIVDPEIYLAMKDALGKLKELPEDSARSLELPDGRFVEADDEVLFFPENAASILTPRGVAEIGGSIHHARLYGWLTKKGELKVGMLRVYGAEFPWLMRESGSRNVLSMPIHRGSQSFRDMQDTTRKAVESGEAVEFAWITQNDELEFDPDDYIAHGGKDELRQFLGFMPECRWRVDGFKKNYQIRIRPAMLSREQLPSDIQRRLESKTLTKNESLLLKALDTGLVVAIGGLLPLETLKVIRRNNLGFPRWRGNGNLPTSFEVRSSALRALGVEGSGGSSMSKTIKDLEEFAAEKLGYDIVFQESISMEPQEVEHLITTDEKSVLVNSTYDDNKEITISMISTPHPEYRPIALIIQDMEGEVQRKELGSGGSPKKKRKV

SEQ ID NO: 892 - protein, 1499 aa, unidentified
MSSDVVFCWSTGPSAGDTTLRRRIEPWEFKDSFDPHQLRKETRLLSEVWWGKSSRPWRESRQNATHHVEMNFIEKFTSERHLRPHVCCSITWFLSWSPCWECAKAIREFVSQHPKVRLVIYVARLYWHLDEQNRQGLRALVAGGVHVQIMSDSDYGYCWRNFVNYPPGQEAAWPRFLPVWTALYALELSCILLSLPPCLRISRRRQNQLTFFQVILKNCHYRAIPPLVLSAAGMMHPSVAWCWAESGTETPGTSESATPESMSTDMKNYRIGVAVGDRSVGLAAIEFDDDGLPIQKLALVTFRHDGGLDPTKNKTPMSRKETRGIARRTMRMNRERKRRLRNLDNVLENLGYSVPEGPEPETYEAWTSRALLASIKLASADELNEHLVRAVRHMARHRGWANPWWSLDQLEKASQEPSETFEIILARARELFGEKVPANPTLGMLGALAANNEVLLRPRDEKKRKTGYVRGTPLMFAQVRQGDQLAELRRICEVQGIEDQYEALRLGVFDHKHPYVPKERVGKDPLNPSTNRTIRASLEFQEFRILDSVANLRVRIGSRAKRELTEAEYDAAVEFLMDYADKEQPSWADVAEKIGVPGNRLVAPVLEDVQQKTAPYDRSSAAFEKAMGKKTEARQWWESTDDDQLRSLLIAFLVDATNDTEEAAAEAGLSELYKSWPAEEREALSNIDFEKGRVAYSQETLSKLSEYMHEYRVGLHEARKAVFGVDDTWRPPLDKLEEPTGQPAVDRVLTILRRFVLDCERQWGRPRAITVEHTRTGLMGPTQRQKILNEQKKNRADNERIRDELRESGVDNPSRAEVRRHLIVQEQECQCLYCGTMITTTTSELDHIVPRAGGGSSRRENLAAVCRACNAKKKRELFYAWAGPVKSQETIERVRQLKAFKDSKKAKMFKNQIRRLNQTEADEPIDERSLASTSYAAVAVRERLEQHFNEGLALDDKSRVVLDVYAGAVTRESRRAGGIDERILLRGERDKNRFDVRHHAVDAAVMTLLNRSVALTLEQRSQLRRTFYEQGLDKLDRNQLKPEEDWRDFTGLAPASQEKFLEWRKAATILGDLLAEAIEDDSIAVVSPLRLRPQNGSVHLETISAVKKQTLGSDWPADAVKRIVDPEIYLAMKDALGKLKELPEDSARSLELPDGRFVEADDEVLFFPENAASILTPRGVAEIGGSIHHARLYGWLTKKGELKVGMLRVYGAEFPWLMRESGSRNVLSMPIHRGSQSFRDMQDTTRKAVESGEAVEFAWITQNDELEFDPDDYIAHGGKDELRQFLGFMPECRWRVDGFKKNYQIRIRPAMLSREQLPSDIQRRLESKTLTKNESLLLKALDTGLVVAIGGLLPLETLKVIRRNNLGFPRWRGNGNLPTSFEVRSSALRALGVEGSGGSSMSKTIKDLEEFAAEKLGYDIVFQESISMEPQEVEHLITTDEKSVLVNSTYDDNKEITISMISTPHPEYRPIALIIQDMEGEVQRKELGSGGSPKKKRKV

SEQ ID NO: 893 - protein, 1483 aa, unidentified
MTTMRGPAAGDATLRRRIEPWDFQDFFDPRDLRRETCLLYEINWGGRHSVWRHTGKNTSNHVEVNFIEKFTSERYYSPSARCSIIWFLSWSPCWECSKAIIEFLHQHRNVTLFIYVARLFHHTDLRNRQGIRDLISSGVTIQIMTEPEYCYCWRYFVNYPPGSEVHWPRYPRQWMMLYVLELQCIILGLPSCVKILRRHQNQLTIFTLDLQNCHYQMIPPHILLATGLISGTETPGTSESATPESMSTDMKNYRIGVAVGDRSVGLAAIEFDDDGLPIQKLALVTFRHDGGLDPTKNKTPMSRKETRGIARRTMRMNRERKRRLRNLDNVLENLGYSVPEGPEPETYEAWTSRALLASIKLASADELNEHLVRAVRHMARHRGWANPWWSLDQLEKASQEPSETFEIILARARELFGEKVPANPTLGMLGALAANNEVLLRPRDEKKRKTGYVRGTPLMFAQVRQGDQLAELRRICEVQGIEDQYEALRLGVFDHKHPYVPKERVGKDPLNPSTNRTIRASLEFQEFRILDSVANLRVRIGSRAKRELTEAEYDAAVEFLMDYADKEQPSWADVAEKIGVPGNRLVAPVLEDVQQKTAPYDRSSAAFEKAMGKKTEARQWWESTDDDQLRSLLIAFLVDATNDTEEAAAEAGLSELYKSWPAEEREALSNIDFEKGRVAYSQETLSKLSEYMHEYRVGLHEARKAVFGVDDTWRPPLDKLEEPTGQPAVDRVLTILRRFVLDCERQWGRPRAITVEHTRTGLMGPTQRQKILNEQKKNRADNERIRDELRESGVDNPSRAEVRRHLIVQEQECQCLYCGTMITTTTSELDHIVPRAGGGSSRRENLAAVCRACNAKKKRELFYAWAGPVKSQETIERVRQLKAFKDSKKAKMFKNQIRRLNQTEADEPIDERSLASTSYAAVAVRERLEQHFNEGLALDDKSRVVLDVYAGAVTRESRRAGGIDERILLRGERDKNRFDVRHHAVDAAVMTLLNRSVALTLEQRSQLRRTFYEQGLDKLDRNQLKPEEDWRDFTGLAPASQEKFLEWRKAATILGDLLAEAIEDDSIAVVSPLRLRPQNGSVHLETISAVKKQTLGSDWPADAVKRIVDPEIYLAMKDALGKLKELPEDSARSLELPDGRFVEADDEVLFFPENAASILTPRGVAEIGGSIHHARLYGWLTKKGELKVGMLRVYGAEFPWLMRESGSRNVLSMPIHRGSQSFRDMQDTTRKAVESGEAVEFAWITQNDELEFDPDDYIAHGGKDELRQFLGFMPECRWRVDGFKKNYQIRIRPAMLSREQLPSDIQRRLESKTLTKNESLLLKALDTGLVVAIGGLLPLETLKVIRRNNLGFPRWRGNGNLPTSFEVRSSALRALGVEGSGGSSMSKTIKDLEEFAAEKLGYDIVFQESISMEPQEVEHLITTDEKSVLVNSTYDDNKEITISMISTPHPEYRPIALIIQDMEGEVQRKELGSGGSPKKKRKV

SEQ ID NO: 894 - protein, 1482 aa, unidentified
MSSQTGPAVVDPTLRRRIEPQDFEAFFDPRELRKETCLLYEISWGGRHNTWRHTSRNTDKHVEINFIKKLTSERSFRPSARCSITWFLSWSPCWECSKAITEFLSQHPNVTLFIYVARLYHHMDPGNRQGLRNLVCRGVTVQIMTEQEYCYCWKNFVNYPPSNEVYWPRFPNVWMKLYILELLCIILGLPPCLRILRRNQCQATLFTLVFQGCHFQRIPPPIFWATGMSGTETPGTSESATPESMSTDMKNYRIGVAVGDRSVGLAAIEFDDDGLPIQKLALVTFRHDGGLDPTKNKTPMSRKETRGIARRTMRMNRERKRRLRNLDNVLENLGYSVPEGPEPETYEAWTSRALLASIKLASADELNEHLVRAVRHMARHRGWANPWWSLDQLEKASQEPSETFEIILARARELFGEKVPANPTLGMLGALAANNEVLLRPRDEKKRKTGYVRGTPLMFAQVRQGDQLAELRRICEVQGIEDQYEALRLGVFDHKHPYVPKERVGKDPLNPSTNRTIRASLEFQEFRILDSVANLRVRIGSRAKRELTEAEYDAAVEFLMDYADKEQPSWADVAEKIGVPGNRLVAPVLEDVQQKTAPYDRSSAAFEKAMGKKTEARQWWESTDDDQLRSLLIAFLVDATNDTEEAAAEAGLSELYKSWPAEEREALSNIDFEKGRVAYSQETLSKLSEYMHEYRVGLHEARKAVFGVDDTWRPPLDKLEEPTGQPAVDRVLTILRRFVLDCERQWGRPRAITVEHTRTGLMGPTQRQKILNEQKKNRADNERIRDELRESGVDNPSRAEVRRHLIVQEQECQCLYCGTMITTTTSELDHIVPRAGGGSSRRENLAAVCRACNAKKKRELFYAWAGPVKSQETIERVRQLKAFKDSKKAKMFKNQIRRLNQTEADEPIDERSLASTSYAAVAVRERLEQHFNEGLALDDKSRVVLDVYAGAVTRESRRAGGIDERILLRGERDKNRFDVRHHAVDAAVMTLLNRSVALTLEQRSQLRRTFYEQGLDKLDRNQLKPEEDWRDFTGLAPASQEKFLEWRKAATILGDLLAEAIEDDSIAVVSPLRLRPQNGSVHLETISAVKKQTLGSDWPADAVKRIVDPEIYLAMKDALGKLKELPEDSARSLELPDGRFVEADDEVLFFPENAASILTPRGVAEIGGSIHHARLYGWLTKKGELKVGMLRVYGAEFPWLMRESGSRNVLSMPIHRGSQSFRDMQDTTRKAVESGEAVEFAWITQNDELEFDPDDYIAHGGKDELRQFLGFMPECRWRVDGFKKNYQIRIRPAMLSREQLPSDIQRRLESKTLTKNESLLLKALDTGLVVAIGGLLPLETLKVIRRNNLGFPRWRGNGNLPTSFEVRSSALRALGVEGSGGSSMSKTIKDLEEFAAEKLGYDIVFQESISMEPQEVEHLITTDEKSVLVNSTYDDNKEITISMISTPHPEYRPIALIIQDMEGEVQRKELGSGGSPKKKRKV

SEQ ID NO: 895 - protein, 1482 aa, unidentified
MSSETGPAVVDPTLRRRIEPQEFEVFFDPRELRKETCLLYEISWGGRRSIWRHTSRNTDKHVEINFIEKLTSERSFRPSARCSITWFLSWSPCGECSKAITEFLSQHPNVTLFIYVARLYHHMDPGNRQGLRNLICRGVTVQIMTEQEYCYCWKNFVNYPPSNEVYWPRFPNVWMRLYMLELLCIILGLPPCLRILRRNQRQGTLFTLVFQRCHYQRIPPPIVWARGMSGTETPGTSESATPESMSTDMKNYRIGVAVGDRSVGLAAIEFDDDGLPIQKLALVTFRHDGGLDPTKNKTPMSRKETRGIARRTMRMNRERKRRLRNLDNVLENLGYSVPEGPEPETYEAWTSRALLASIKLASADELNEHLVRAVRHMARHRGWANPWWSLDQLEKASQEPSETFEIILARARELFGEKVPANPTLGMLGALAANNEVLLRPRDEKKRKTGYVRGTPLMFAQVRQGDQLAELRRICEVQGIEDQYEALRLGVFDHKHPYVPKERVGKDPLNPSTNRTIRASLEFQEFRILDSVANLRVRIGSRAKRELTEAEYDAAVEFLMDYADKEQPSWADVAEKIGVPGNRLVAPVLEDVQQKTAPYDRSSAAFEKAMGKKTEARQWWESTDDDQLRSLLIAFLVDATNDTEEAAAEAGLSELYKSWPAEEREALSNIDFEKGRVAYSQETLSKLSEYMHEYRVGLHEARKAVFGVDDTWRPPLDKLEEPTGQPAVDRVLTILRRFVLDCERQWGRPRAITVEHTRTGLMGPTQRQKILNEQKKNRADNERIRDELRESGVDNPSRAEVRRHLIVQEQECQCLYCGTMITTTTSELDHIVPRAGGGSSRRENLAAVCRACNAKKKRELFYAWAGPVKSQETIERVRQLKAFKDSKKAKMFKNQIRRLNQTEADEPIDERSLASTSYAAVAVRERLEQHFNEGLALDDKSRVVLDVYAGAVTRESRRAGGIDERILLRGERDKNRFDVRHHAVDAAVMTLLNRSVALTLEQRSQLRRTFYEQGLDKLDRNQLKPEEDWRDFTGLAPASQEKFLEWRKAATILGDLLAEAIEDDSIAVVSPLRLRPQNGSVHLETISAVKKQTLGSDWPADAVKRIVDPEIYLAMKDALGKLKELPEDSARSLELPDGRFVEADDEVLFFPENAASILTPRGVAEIGGSIHHARLYGWLTKKGELKVGMLRVYGAEFPWLMRESGSRNVLSMPIHRGSQSFRDMQDTTRKAVESGEAVEFAWITQNDELEFDPDDYIAHGGKDELRQFLGFMPECRWRVDGFKKNYQIRIRPAMLSREQLPSDIQRRLESKTLTKNESLLLKALDTGLVVAIGGLLPLETLKVIRRNNLGFPRWRGNGNLPTSFEVRSSALRALGVEGSGGSSMSKTIKDLEEFAAEKLGYDIVFQESISMEPQEVEHLITTDEKSVLVNSTYDDNKEITISMISTPHPEYRPIALIIQDMEGEVQRKELGSGGSPKKKRKV

SEQ ID NO: 896 - protein, 1490 aa, unidentified
MTSEKGPSTGDATLRRRIEPWEFEVFFNPGELRKETCMFYEIKWGTSQKIWRNSSKNTTNHVEVNFIEKFTAERHFCPSISCSITWFLSWSPCWECSKAIREFLSQHPNTTLVIYTARLFQHMDQQNRQGLRDLINSGVTVQIMTISEYCYCWRNFVNYSPKEETHWPKYQPLLMMLYALELHCIILSLPPCLKISRRYQKQLTFFNLILQNCHYQTIPPHILLSLGLIQPSVTWRSGTETPGTSESATPESMSTDMKNYRIGVAVGDRSVGLAAIEFDDDGLPIQKLALVTFRHDGGLDPTKNKTPMSRKETRGIARRTMRMNRERKRRLRNLDNVLENLGYSVPEGPEPETYEAWTSRALLASIKLASADELNEHLVRAVRHMARHRGWANPWWSLDQLEKASQEPSETFEIILARARELFGEKVPANPTLGMLGALAANNEVLLRPRDEKKRKTGYVRGTPLMFAQVRQGDQLAELRRICEVQGIEDQYEALRLGVFDHKHPYVPKERVGKDPLNPSTNRTIRASLEFQEFRILDSVANLRVRIGSRAKRELTEAEYDAAVEFLMDYADKEQPSWADVAEKIGVPGNRLVAPVLEDVQQKTAPYDRSSAAFEKAMGKKTEARQWWESTDDDQLRSLLIAFLVDATNDTEEAAAEAGLSELYKSWPAEEREALSNIDFEKGRVAYSQETLSKLSEYMHEYRVGLHEARKAVFGVDDTWRPPLDKLEEPTGQPAVDRVLTILRRFVLDCERQWGRPRAITVEHTRTGLMGPTQRQKILNEQKKNRADNERIRDELRESGVDNPSRAEVRRHLIVQEQECQCLYCGTMITTTTSELDHIVPRAGGGSSRRENLAAVCRACNAKKKRELFYAWAGPVKSQETIERVRQLKAFKDSKKAKMFKNQIRRLNQTEADEPIDERSLASTSYAAVAVRERLEQHFNEGLALDDKSRVVLDVYAGAVTRESRRAGGIDERILLRGERDKNRFDVRHHAVDAAVMTLLNRSVALTLEQRSQLRRTFYEQGLDKLDRNQLKPEEDWRDFTGLAPASQEKFLEWRKAATILGDLLAEAIEDDSIAVVSPLRLRPQNGSVHLETISAVKKQTLGSDWPADAVKRIVDPEIYLAMKDALGKLKELPEDSARSLELPDGRFVEADDEVLFFPENAASILTPRGVAEIGGSIHHARLYGWLTKKGELKVGMLRVYGAEFPWLMRESGSRNVLSMPIHRGSQSFRDMQDTTRKAVESGEAVEFAWITQNDELEFDPDDYIAHGGKDELRQFLGFMPECRWRVDGFKKNYQIRIRPAMLSREQLPSDIQRRLESKTLTKNESLLLKALDTGLVVAIGGLLPLETLKVIRRNNLGFPRWRGNGNLPTSFEVRSSALRALGVEGSGGSSMSKTIKDLEEFAAEKLGYDIVFQESISMEPQEVEHLITTDEKSVLVNSTYDDNKEITISMISTPHPEYRPIALIIQDMEGEVQRKELGSGGSPKKKRKV

SEQ ID NO: 897 - protein, 1482 aa, unidentified
MSSETGPAVVDPTLRRRIEPQEFEVFFDPRELRKETCLLYEISWGGRRSIWRHTSRNTDKHVEINFIEKLTSQRSFRPSARCSITWFLSWSPCGECSKAITEFLSQHPNVTLFIYVARLYHHMDPGNRQGLRNLICRGVTVQIMTEQEYCYCWKNFVNYPPSNEVYWPRFPNVWMRLYMLELLCIILGLPPCLRILRRNQRHDTLFTLVFQRCHYQRIPPPIIWARGMSGTETPGTSESATPESMSTDMKNYRIGVAVGDRSVGLAAIEFDDDGLPIQKLALVTFRHDGGLDPTKNKTPMSRKETRGIARRTMRMNRERKRRLRNLDNVLENLGYSVPEGPEPETYEAWTSRALLASIKLASADELNEHLVRAVRHMARHRGWANPWWSLDQLEKASQEPSETFEIILARARELFGEKVPANPTLGMLGALAANNEVLLRPRDEKKRKTGYVRGTPLMFAQVRQGDQLAELRRICEVQGIEDQYEALRLGVFDHKHPYVPKERVGKDPLNPSTNRTIRASLEFQEFRILDSVANLRVRIGSRAKRELTEAEYDAAVEFLMDYADKEQPSWADVAEKIGVPGNRLVAPVLEDVQQKTAPYDRSSAAFEKAMGKKTEARQWWESTDDDQLRSLLIAFLVDATNDTEEAAAEAGLSELYKSWPAEEREALSNIDFEKGRVAYSQETLSKLSEYMHEYRVGLHEARKAVFGVDDTWRPPLDKLEEPTGQPAVDRVLTILRRFVLDCERQWGRPRAITVEHTRTGLMGPTQRQKILNEQKKNRADNERIRDELRESGVDNPSRAEVRRHLIVQEQECQCLYCGTMITTTTSELDHIVPRAGGGSSRRENLAAVCRACNAKKKRELFYAWAGPVKSQETIERVRQLKAFKDSKKAKMFKNQIRRLNQTEADEPIDERSLASTSYAAVAVRERLEQHFNEGLALDDKSRVVLDVYAGAVTRESRRAGGIDERILLRGERDKNRFDVRHHAVDAAVMTLLNRSVALTLEQRSQLRRTFYEQGLDKLDRNQLKPEEDWRDFTGLAPASQEKFLEWRKAATILGDLLAEAIEDDSIAVVSPLRLRPQNGSVHLETISAVKKQTLGSDWPADAVKRIVDPEIYLAMKDALGKLKELPEDSARSLELPDGRFVEADDEVLFFPENAASILTPRGVAEIGGSIHHARLYGWLTKKGELKVGMLRVYGAEFPWLMRESGSRNVLSMPIHRGSQSFRDMQDTTRKAVESGEAVEFAWITQNDELEFDPDDYIAHGGKDELRQFLGFMPECRWRVDGFKKNYQIRIRPAMLSREQLPSDIQRRLESKTLTKNESLLLKALDTGLVVAIGGLLPLETLKVIRRNNLGFPRWRGNGNLPTSFEVRSSALRALGVEGSGGSSMSKTIKDLEEFAAEKLGYDIVFQESISMEPQEVEHLITTDEKSVLVNSTYDDNKEITISMISTPHPEYRPIALIIQDMEGEVQRKELGSGGSPKKKRKV

SEQ ID NO: 898 - protein, 1433 aa, unidentified
MRKETGMYISKAALKHNFNPHETPKDTYLLCKLQWGETGTPWIHWVRNERYHHAESYFLEKIFKMRRSSNYVKCNITWYLSWSPCADCCHKILNFLKRHSNVNIDIYVARLYYIEDEEIRQCLKNLVSLAEVTIAVMKIEDYIYCQKKFIQGGDDDDSWTVSFQPEISKNRLKLKDVFESGTETPGTSESATPESMSTDMKNYRIGVAVGDRSVGLAAIEFDDDGLPIQKLALVTFRHDGGLDPTKNKTPMSRKETRGIARRTMRMNRERKRRLRNLDNVLENLGYSVPEGPEPETYEAWTSRALLASIKLASADELNEHLVRAVRHMARHRGWANPWWSLDQLEKASQEPSETFEIILARARELFGEKVPANPTLGMLGALAANNEVLLRPRDEKKRKTGYVRGTPLMFAQVRQGDQLAELRRICEVQGIEDQYEALRLGVFDHKHPYVPKERVGKDPLNPSTNRTIRASLEFQEFRILDSVANLRVRIGSRAKRELTEAEYDAAVEFLMDYADKEQPSWADVAEKIGVPGNRLVAPVLEDVQQKTAPYDRSSAAFEKAMGKKTEARQWWESTDDDQLRSLLIAFLVDATNDTEEAAAEAGLSELYKSWPAEEREALSNIDFEKGRVAYSQETLSKLSEYMHEYRVGLHEARKAVFGVDDTWRPPLDKLEEPTGQPAVDRVLTILRRFVLDCERQWGRPRAITVEHTRTGLMGPTQRQKILNEQKKNRADNERIRDELRESGVDNPSRAEVRRHLIVQEQECQCLYCGTMITTTTSELDHIVPRAGGGSSRRENLAAVCRACNAKKKRELFYAWAGPVKSQETIERVRQLKAFKDSKKAKMFKNQIRRLNQTEADEPIDERSLASTSYAAVAVRERLEQHFNEGLALDDKSRVVLDVYAGAVTRESRRAGGIDERILLRGERDKNRFDVRHHAVDAAVMTLLNRSVALTLEQRSQLRRTFYEQGLDKLDRNQLKPEEDWRDFTGLAPASQEKFLEWRKAATILGDLLAEAIEDDSIAVVSPLRLRPQNGSVHLETISAVKKQTLGSDWPADAVKRIVDPEIYLAMKDALGKLKELPEDSARSLELPDGRFVEADDEVLFFPENAASILTPRGVAEIGGSIHHARLYGWLTKKGELKVGMLRVYGAEFPWLMRESGSRNVLSMPIHRGSQSFRDMQDTTRKAVESGEAVEFAWITQNDELEFDPDDYIAHGGKDELRQFLGFMPECRWRVDGFKKNYQIRIRPAMLSREQLPSDIQRRLESKTLTKNESLLLKALDTGLVVAIGGLLPLETLKVIRRNNLGFPRWRGNGNLPTSFEVRSSALRALGVEGSGGSSMSKTIKDLEEFAAEKLGYDIVFQESISMEPQEVEHLITTDEKSVLVNSTYDDNKEITISMISTPHPEYRPIALIIQDMEGEVQRKELGSGGSPKKKRKV

SEQ ID NO: 899 - protein, 1437 aa, unidentified
MYKKKLRGMYMSKKAFKYHFDPRESPRATYLLCVIQWGCNGLPWIHWVKNGRSHAERYFLQKVFKMRRSNNNINCSITLYLSWSPCRNCCYEMQYFLKKHPNVNICIYLARLYYTEDEEICKALKDLSEKKVIISVMKIEDYIYCWKTFVSGNAAAGSWFKDFESQINKNHFQLKRILEVSPLSGTETPGTSESATPESMSTDMKNYRIGVAVGDRSVGLAAIEFDDDGLPIQKLALVTFRHDGGLDPTKNKTPMSRKETRGIARRTMRMNRERKRRLRNLDNVLENLGYSVPEGPEPETYEAWTSRALLASIKLASADELNEHLVRAVRHMARHRGWANPWWSLDQLEKASQEPSETFEIILARARELFGEKVPANPTLGMLGALAANNEVLLRPRDEKKRKTGYVRGTPLMFAQVRQGDQLAELRRICEVQGIEDQYEALRLGVFDHKHPYVPKERVGKDPLNPSTNRTIRASLEFQEFRILDSVANLRVRIGSRAKRELTEAEYDAAVEFLMDYADKEQPSWADVAEKIGVPGNRLVAPVLEDVQQKTAPYDRSSAAFEKAMGKKTEARQWWESTDDDQLRSLLIAFLVDATNDTEEAAAEAGLSELYKSWPAEEREALSNIDFEKGRVAYSQETLSKLSEYMHEYRVGLHEARKAVFGVDDTWRPPLDKLEEPTGQPAVDRVLTILRRFVLDCERQWGRPRAITVEHTRTGLMGPTQRQKILNEQKKNRADNERIRDELRESGVDNPSRAEVRRHLIVQEQECQCLYCGTMITTTTSELDHIVPRAGGGSSRRENLAAVCRACNAKKKRELFYAWAGPVKSQETIERVRQLKAFKDSKKAKMFKNQIRRLNQTEADEPIDERSLASTSYAAVAVRERLEQHFNEGLALDDKSRVVLDVYAGAVTRESRRAGGIDERILLRGERDKNRFDVRHHAVDAAVMTLLNRSVALTLEQRSQLRRTFYEQGLDKLDRNQLKPEEDWRDFTGLAPASQEKFLEWRKAATILGDLLAEAIEDDSIAVVSPLRLRPQNGSVHLETISAVKKQTLGSDWPADAVKRIVDPEIYLAMKDALGKLKELPEDSARSLELPDGRFVEADDEVLFFPENAASILTPRGVAEIGGSIHHARLYGWLTKKGELKVGMLRVYGAEFPWLMRESGSRNVLSMPIHRGSQSFRDMQDTTRKAVESGEAVEFAWITQNDELEFDPDDYIAHGGKDELRQFLGFMPECRWRVDGFKKNYQIRIRPAMLSREQLPSDIQRRLESKTLTKNESLLLKALDTGLVVAIGGLLPLETLKVIRRNNLGFPRWRGNGNLPTSFEVRSSALRALGVEGSGGSSMSKTIKDLEEFAAEKLGYDIVFQESISMEPQEVEHLITTDEKSVLVNSTYDDNKEITISMISTPHPEYRPIALIIQDMEGEVQRKELGSGGSPKKKRKV

SEQ ID NO: 900 - protein, 1447 aa, unidentified
MAAVSARGPSSRENNQGWKMQPEDFQRNYSPRQNGRVYLLYEIRWRSSSIWRNWCSNNPEQHAEVNFLENHFNNQPQTPCCITWFLSASPCGNCCRRILKFLRSHPNVTLVICAAKLFRHLDIRNRRGLRSLMMNGVAIRIMNLEDYRYCWRNFVAHQPGQDDYWPQNVTLYFILNSIELLHIFLDLPPFLANSGTETPGTSESATPESMSTDMKNYRIGVAVGDRSVGLAAIEFDDDGLPIQKLALVTFRHDGGLDPTKNKTPMSRKETRGIARRTMRMNRERKRRLRNLDNVLENLGYSVPEGPEPETYEAWTSRALLASIKLASADELNEHLVRAVRHMARHRGWANPWWSLDQLEKASQEPSETFEIILARARELFGEKVPANPTLGMLGALAANNEVLLRPRDEKKRKTGYVRGTPLMFAQVRQGDQLAELRRICEVQGIEDQYEALRLGVFDHKHPYVPKERVGKDPLNPSTNRTIRASLEFQEFRILDSVANLRVRIGSRAKRELTEAEYDAAVEFLMDYADKEQPSWADVAEKIGVPGNRLVAPVLEDVQQKTAPYDRSSAAFEKAMGKKTEARQWWESTDDDQLRSLLIAFLVDATNDTEEAAAEAGLSELYKSWPAEEREALSNIDFEKGRVAYSQETLSKLSEYMHEYRVGLHEARKAVFGVDDTWRPPLDKLEEPTGQPAVDRVLTILRRFVLDCERQWGRPRAITVEHTRTGLMGPTQRQKILNEQKKNRADNERIRDELRESGVDNPSRAEVRRHLIVQEQECQCLYCGTMITTTTSELDHIVPRAGGGSSRRENLAAVCRACNAKKKRELFYAWAGPVKSQETIERVRQLKAFKDSKKAKMFKNQIRRLNQTEADEPIDERSLASTSYAAVAVRERLEQHFNEGLALDDKSRVVLDVYAGAVTRESRRAGGIDERILLRGERDKNRFDVRHHAVDAAVMTLLNRSVALTLEQRSQLRRTFYEQGLDKLDRNQLKPEEDWRDFTGLAPASQEKFLEWRKAATILGDLLAEAIEDDSIAVVSPLRLRPQNGSVHLETISAVKKQTLGSDWPADAVKRIVDPEIYLAMKDALGKLKELPEDSARSLELPDGRFVEADDEVLFFPENAASILTPRGVAEIGGSIHHARLYGWLTKKGELKVGMLRVYGAEFPWLMRESGSRNVLSMPIHRGSQSFRDMQDTTRKAVESGEAVEFAWITQNDELEFDPDDYIAHGGKDELRQFLGFMPECRWRVDGFKKNYQIRIRPAMLSREQLPSDIQRRLESKTLTKNESLLLKALDTGLVVAIGGLLPLETLKVIRRNNLGFPRWRGNGNLPTSFEVRSSALRALGVEGSGGSSMSKTIKDLEEFAAEKLGYDIVFQESISMEPQEVEHLITTDEKSVLVNSTYDDNKEITISMISTPHPEYRPIALIIQDMEGEVQRKELGSGGSPKKKRKV

SEQ ID NO: 901 - protein, 1628 aa, unidentified
MYRRKMRGMYISKRALRIHFDPCKFPKETYLLCELQWRGSTKFWQHWVRNDHDYEDCHAEQYFLDEVFEPRSYNICDMTWYLSWSPCRECCDIIRDFLEEQPNVNIDIRVARLYYTNIPRYRDGLRELHSLEGVTIKAMEAEDYNYCWETFIQPGVNYYFSPNNFKSEIQRNRTKLEDILQGLHLYARITVLLVLFFRWKMQPRDFQRNYSPRQNGRVYLLYEIRWRRGSIWRNWCSNNHEQHAEVNFLENHFSVRPQTPCSITWFLSTSPCGKCSRRILEFLRSHPNVTLVIYAAKLFRHHDNRNRQGLRNLIMNGVTLRIMNLEDYRYCWRNFVAYQTGEDDYWPQNVTLYFLLNSTELLHIFWGLPPFLANSGTETPGTSESATPESMSTDMKNYRIGVAVGDRSVGLAAIEFDDDGLPIQKLALVTFRHDGGLDPTKNKTPMSRKETRGIARRTMRMNRERKRRLRNLDNVLENLGYSVPEGPEPETYEAWTSRALLASIKLASADELNEHLVRAVRHMARHRGWANPWWSLDQLEKASQEPSETFEIILARARELFGEKVPANPTLGMLGALAANNEVLLRPRDEKKRKTGYVRGTPLMFAQVRQGDQLAELRRICEVQGIEDQYEALRLGVFDHKHPYVPKERVGKDPLNPSTNRTIRASLEFQEFRILDSVANLRVRIGSRAKRELTEAEYDAAVEFLMDYADKEQPSWADVAEKIGVPGNRLVAPVLEDVQQKTAPYDRSSAAFEKAMGKKTEARQWWESTDDDQLRSLLIAFLVDATNDTEEAAAEAGLSELYKSWPAEEREALSNIDFEKGRVAYSQETLSKLSEYMHEYRVGLHEARKAVFGVDDTWRPPLDKLEEPTGQPAVDRVLTILRRFVLDCERQWGRPRAITVEHTRTGLMGPTQRQKILNEQKKNRADNERIRDELRESGVDNPSRAEVRRHLIVQEQECQCLYCGTMITTTTSELDHIVPRAGGGSSRRENLAAVCRACNAKKKRELFYAWAGPVKSQETIERVRQLKAFKDSKKAKMFKNQIRRLNQTEADEPIDERSLASTSYAAVAVRERLEQHFNEGLALDDKSRVVLDVYAGAVTRESRRAGGIDERILLRGERDKNRFDVRHHAVDAAVMTLLNRSVALTLEQRSQLRRTFYEQGLDKLDRNQLKPEEDWRDFTGLAPASQEKFLEWRKAATILGDLLAEAIEDDSIAVVSPLRLRPQNGSVHLETISAVKKQTLGSDWPADAVKRIVDPEIYLAMKDALGKLKELPEDSARSLELPDGRFVEADDEVLFFPENAASILTPRGVAEIGGSIHHARLYGWLTKKGELKVGMLRVYGAEFPWLMRESGSRNVLSMPIHRGSQSFRDMQDTTRKAVESGEAVEFAWITQNDELEFDPDDYIAHGGKDELRQFLGFMPECRWRVDGFKKNYQIRIRPAMLSREQLPSDIQRRLESKTLTKNESLLLKALDTGLVVAIGGLLPLETLKVIRRNNLGFPRWRGNGNLPTSFEVRSSALRALGVEGSGGSSMSKTIKDLEEFAAEKLGYDIVFQESISMEPQEVEHLITTDEKSVLVNSTYDDNKEITISMISTPHPEYRPIALIIQDMEGEVQRKELGSGGSPKKKRKV

SEQ ID NO: 902 - protein, 1459 aa, unidentified
MERSSGRDWLDECCPRGCKYTSNYRGPMKGLFQKAFYFHFENLHYADHRRKTFLCFEVTRLQDNKFRKGMFINQVGPYRLHAELRFLSWFHDSWLCPYASYEVTWYMSWSPCEECMEELAAFLANHRNVTLTIYVARLYYYQEPTCGEGLQALLNEGASVNIMFFRDFLDCWRRFVYNGNEYFEPWPHLHQNSLKYFHILEELLESGTETPGTSESATPESMSTDMKNYRIGVAVGDRSVGLAAIEFDDDGLPIQKLALVTFRHDGGLDPTKNKTPMSRKETRGIARRTMRMNRERKRRLRNLDNVLENLGYSVPEGPEPETYEAWTSRALLASIKLASADELNEHLVRAVRHMARHRGWANPWWSLDQLEKASQEPSETFEIILARARELFGEKVPANPTLGMLGALAANNEVLLRPRDEKKRKTGYVRGTPLMFAQVRQGDQLAELRRICEVQGIEDQYEALRLGVFDHKHPYVPKERVGKDPLNPSTNRTIRASLEFQEFRILDSVANLRVRIGSRAKRELTEAEYDAAVEFLMDYADKEQPSWADVAEKIGVPGNRLVAPVLEDVQQKTAPYDRSSAAFEKAMGKKTEARQWWESTDDDQLRSLLIAFLVDATNDTEEAAAEAGLSELYKSWPAEEREALSNIDFEKGRVAYSQETLSKLSEYMHEYRVGLHEARKAVFGVDDTWRPPLDKLEEPTGQPAVDRVLTILRRFVLDCERQWGRPRAITVEHTRTGLMGPTQRQKILNEQKKNRADNERIRDELRESGVDNPSRAEVRRHLIVQEQECQCLYCGTMITTTTSELDHIVPRAGGGSSRRENLAAVCRACNAKKKRELFYAWAGPVKSQETIERVRQLKAFKDSKKAKMFKNQIRRLNQTEADEPIDERSLASTSYAAVAVRERLEQHFNEGLALDDKSRVVLDVYAGAVTRESRRAGGIDERILLRGERDKNRFDVRHHAVDAAVMTLLNRSVALTLEQRSQLRRTFYEQGLDKLDRNQLKPEEDWRDFTGLAPASQEKFLEWRKAATILGDLLAEAIEDDSIAVVSPLRLRPQNGSVHLETISAVKKQTLGSDWPADAVKRIVDPEIYLAMKDALGKLKELPEDSARSLELPDGRFVEADDEVLFFPENAASILTPRGVAEIGGSIHHARLYGWLTKKGELKVGMLRVYGAEFPWLMRESGSRNVLSMPIHRGSQSFRDMQDTTRKAVESGEAVEFAWITQNDELEFDPDDYIAHGGKDELRQFLGFMPECRWRVDGFKKNYQIRIRPAMLSREQLPSDIQRRLESKTLTKNESLLLKALDTGLVVAIGGLLPLETLKVIRRNNLGFPRWRGNGNLPTSFEVRSSALRALGVEGSGGSSMSKTIKDLEEFAAEKLGYDIVFQESISMEPQEVEHLITTDEKSVLVNSTYDDNKEITISMISTPHPEYRPIALIIQDMEGEVQRKELGSGGSPKKKRKV

SEQ ID NO: 903 - protein, 1248 aa, unidentified
MTFLRMDIPDGPLAGRPVRSRMDGVHPVHGRVLALQRAAGNAATTSALGTVQRSVVDEIARMKPDQLVVALQELNPKAAATNLWVTVDGKPVTELISRPAGFESLWPIQSGRGPHAEERFAQGVMPLLAARQPRYILLEITKSPCPSCTALLSQLVGEHPGTRFELHMLGLYPGAGEAEGERGAATRPEDLAELERKLQAKLLDLRAVIDRLTDEQWRKRFKYPKHTKIPIGTRIAALKFARSVHTTMVEARLKLGERQDQTAYGAKLKDLEDKFAELAAFLTAKKADATASARHEPYPAHETGRPTPAAETVTDLDRWTAIKAECPDLQLSEQTYGEYFLYSSHRAFTWFYVHNSLPESGTETPGTSESATPESMERELVLGIAYGGKYTGLAVVDRRHNQVLYANRLKMRDDVAGILKDRRKQRGIRRTAQTKKKRLRELKNYLKSIGYNESTATFETVYSLAHKRGYDYADMPEEKTSEEIEAMDVEERKQWEKEKQEWEETKRNSRHRKEVVKDVHKAMIEGRATEEQIKRVERIFNKQYRPKRFNNRILTKCKVEDCGVNTPLRKNVRDLLIENIVRFFPIEQSEKDNLKDAVLDKNRREEVKSFFRKHKTDEHIRKQVYDIADNKLSGRTVFCKEHILEHTEHSKEERKVFRLAPSLKTKIENVLAVIKDEILPKFTVNKVVMESNNFDIAAKTQGKKRLAKEEYGKGPREGKETRKEALLRETDGRCIYCGKSIDISNAHDDHIFPRKAGGLNIFANLVACCAVCNENKKGRTPLESGISPKPEIIAFMKNDLKKKILEDARNINTVDFNKYMSHASIGWRYMRDRLRESAGNKKLPIERQSGIYTAYFRRWWGFKKERGNTLHHALDAVILASRKGYSDDGLVDMTLKPKYNKGGEFDPEKHLPEPIEFKMDKGSRGSALHDRNPLSYKKGIITRRFMVTEIECGKEDDVISETYREKLKEAFKRFDTKKGKCLTDKEAKEAGFCIKKNELVMSLKCSIKGTGPGQMIRINNNVFKTNVHNVGVDVYLDEKGKKKAYERKNPRLSKHFIEPPPQPNGRVSFTLKRRDMVTVEGEDAIYRIKKLGTSPTIEAVVGSDGKTRTVSATKLTKANSAELESGGSSMSKTIKDLEEFAAEKLGYDIVFQESISMEPQEVEHLITTDEKSVLVNSTYDDNKEITISMISTPHPEYRPIALIIQDMEGEVQRKELGSGGSPKKKRKVPHPHSPTPDRTSVISHVSGV

SEQ ID NO: 904 - protein, 1125 aa, unidentified
MASETGPSAGDPTLRRRIEPWEFEVFFDPRELRRETCLLYEIQWGTSHRRWRKSGKNTTNHAEVNFIEKLTSERQFCPSVRCSITWFLSWSPCWECSQAIQEFLSQHPNVTLVIYVARLYYHMDQRNRQGLRDLVNSGVTIQIMSVPEYCYCWRNFVNFPPGQEAHWPRYQPQWMALYELELHCIILSLPPCLKISRRCQKQLTFFGLTLQNCHYQAIPPHILLATGLVLPFVPWRSGTETPGTSESATPESMERELVLGIAYGGKYTGLAVVDRRHNQVLYANRLKMRDDVAGILKDRRKQRGIRRTAQTKKKRLRELKNYLKSIGYNESTATFETVYSLAHKRGYDYADMPEEKTSEEIEAMDVEERKQWEKEKQEWEETKRNSRHRKEVVKDVHKAMIEGRATEEQIKRVERIFNKQYRPKRFNNRILTKCKVEDCGVNTPLRKNVRDLLIENIVRFFPIEQSEKDNLKDAVLDKNRREEVKSFFRKHKTDEHIRKQVYDIADNKLSGRTVFCKEHILEHTEHSKEERKVFRLAPSLKTKIENVLAVIKDEILPKFTVNKVVMESNNFDIAAKTQGKKRLAKEEYGKGPREGKETRKEALLRETDGRCIYCGKSIDISNAHDDHIFPRKAGGLNIFANLVACCAVCNENKKGRTPLESGISPKPEIIAFMKNDLKKKILEDARNINTVDFNKYMSHASIGWRYMRDRLRESAGNKKLPIERQSGIYTAYFRRWWGFKKERGNTLHHALDAVILASRKGYSDDGLVDMTLKPKYNKGGEFDPEKHLPEPIEFKMDKGSRGSALHDRNPLSYKKGIITRRFMVTEIECGKEDDVISETYREKLKEAFKRFDTKKGKCLTDKEAKEAGFCIKKNELVMSLKCSIKGTGPGQMIRINNNVFKTNVHNVGVDVYLDEKGKKKAYERKNPRLSKHFIEPPPQPNGRVSFTLKRRDMVTVEGEDAIYRIKKLGTSPTIEAVVGSDGKTRTVSATKLTKANSAELESGGSSMSKTIKDLEEFAAEKLGYDIVFQESISMEPQEVEHLITTDEKSVLVNSTYDDNKEITISMISTPHPEYRPIALIIQDMEGEVQRKELGSGGSPKKKRKVPHPHSPTPDRTSVISHVSGV

SEQ ID NO: 905 - protein, 1134 aa, unidentified
MSSDVVFCWSTGPSAGDTTLRRRIEPWEFKDSFDPHQLRKETRLLSEVWWGKSSRPWRESRQNATHHVEMNFIEKFTSERHLRPHVCCSITWFLSWSPCWECAKAIREFVSQHPKVRLVIYVARLYWHLDEQNRQGLRALVAGGVHVQIMSDSDYGYCWRNFVNYPPGQEAAWPRFLPVWTALYALELSCILLSLPPCLRISRRRQNQLTFFQVILKNCHYRAIPPLVLSAAGMMHPSVAWCWAESGTETPGTSESATPESMERELVLGIAYGGKYTGLAVVDRRHNQVLYANRLKMRDDVAGILKDRRKQRGIRRTAQTKKKRLRELKNYLKSIGYNESTATFETVYSLAHKRGYDYADMPEEKTSEEIEAMDVEERKQWEKEKQEWEETKRNSRHRKEVVKDVHKAMIEGRATEEQIKRVERIFNKQYRPKRFNNRILTKCKVEDCGVNTPLRKNVRDLLIENIVRFFPIEQSEKDNLKDAVLDKNRREEVKSFFRKHKTDEHIRKQVYDIADNKLSGRTVFCKEHILEHTEHSKEERKVFRLAPSLKTKIENVLAVIKDEILPKFTVNKVVMESNNFDIAAKTQGKKRLAKEEYGKGPREGKETRKEALLRETDGRCIYCGKSIDISNAHDDHIFPRKAGGLNIFANLVACCAVCNENKKGRTPLESGISPKPEIIAFMKNDLKKKILEDARNINTVDFNKYMSHASIGWRYMRDRLRESAGNKKLPIERQSGIYTAYFRRWWGFKKERGNTLHHALDAVILASRKGYSDDGLVDMTLKPKYNKGGEFDPEKHLPEPIEFKMDKGSRGSALHDRNPLSYKKGIITRRFMVTEIECGKEDDVISETYREKLKEAFKRFDTKKGKCLTDKEAKEAGFCIKKNELVMSLKCSIKGTGPGQMIRINNNVFKTNVHNVGVDVYLDEKGKKKAYERKNPRLSKHFIEPPPQPNGRVSFTLKRRDMVTVEGEDAIYRIKKLGTSPTIEAVVGSDGKTRTVSATKLTKANSAELESGGSSMSKTIKDLEEFAAEKLGYDIVFQESISMEPQEVEHLITTDEKSVLVNSTYDDNKEITISMISTPHPEYRPIALIIQDMEGEVQRKELGSGGSPKKKRKVPHPHSPTPDRTSVISHVSGV

SEQ ID NO: 906 - protein, 1118 aa, unidentified
MTTMRGPAAGDATLRRRIEPWDFQDFFDPRDLRRETCLLYEINWGGRHSVWRHTGKNTSNHVEVNFIEKFTSERYYSPSARCSIIWFLSWSPCWECSKAIIEFLHQHRNVTLFIYVARLFHHTDLRNRQGIRDLISSGVTIQIMTEPEYCYCWRYFVNYPPGSEVHWPRYPRQWMMLYVLELQCIILGLPSCVKILRRHQNQLTIFTLDLQNCHYQMIPPHILLATGLISGTETPGTSESATPESMERELVLGIAYGGKYTGLAVVDRRHNQVLYANRLKMRDDVAGILKDRRKQRGIRRTAQTKKKRLRELKNYLKSIGYNESTATFETVYSLAHKRGYDYADMPEEKTSEEIEAMDVEERKQWEKEKQEWEETKRNSRHRKEVVKDVHKAMIEGRATEEQIKRVERIFNKQYRPKRFNNRILTKCKVEDCGVNTPLRKNVRDLLIENIVRFFPIEQSEKDNLKDAVLDKNRREEVKSFFRKHKTDEHIRKQVYDIADNKLSGRTVFCKEHILEHTEHSKEERKVFRLAPSLKTKIENVLAVIKDEILPKFTVNKVVMESNNFDIAAKTQGKKRLAKEEYGKGPREGKETRKEALLRETDGRCIYCGKSIDISNAHDDHIFPRKAGGLNIFANLVACCAVCNENKKGRTPLESGISPKPEIIAFMKNDLKKKILEDARNINTVDFNKYMSHASIGWRYMRDRLRESAGNKKLPIERQSGIYTAYFRRWWGFKKERGNTLHHALDAVILASRKGYSDDGLVDMTLKPKYNKGGEFDPEKHLPEPIEFKMDKGSRGSALHDRNPLSYKKGIITRRFMVTEIECGKEDDVISETYREKLKEAFKRFDTKKGKCLTDKEAKEAGFCIKKNELVMSLKCSIKGTGPGQMIRINNNVFKTNVHNVGVDVYLDEKGKKKAYERKNPRLSKHFIEPPPQPNGRVSFTLKRRDMVTVEGEDAIYRIKKLGTSPTIEAVVGSDGKTRTVSATKLTKANSAELESGGSSMSKTIKDLEEFAAEKLGYDIVFQESISMEPQEVEHLITTDEKSVLVNSTYDDNKEITISMISTPHPEYRPIALIIQDMEGEVQRKELGSGGSPKKKRKVPHPHSPTPDRTSVISHVSGV

SEQ ID NO: 907 - protein, 1117 aa, unidentified
MSSQTGPAVVDPTLRRRIEPQDFEAFFDPRELRKETCLLYEISWGGRHNTWRHTSRNTDKHVEINFIKKLTSERSFRPSARCSITWFLSWSPCWECSKAITEFLSQHPNVTLFIYVARLYHHMDPGNRQGLRNLVCRGVTVQIMTEQEYCYCWKNFVNYPPSNEVYWPRFPNVWMKLYILELLCIILGLPPCLRILRRNQCQATLFTLVFQGCHFQRIPPPIFWATGMSGTETPGTSESATPESMERELVLGIAYGGKYTGLAVVDRRHNQVLYANRLKMRDDVAGILKDRRKQRGIRRTAQTKKKRLRELKNYLKSIGYNESTATFETVYSLAHKRGYDYADMPEEKTSEEIEAMDVEERKQWEKEKQEWEETKRNSRHRKEVVKDVHKAMIEGRATEEQIKRVERIFNKQYRPKRFNNRILTKCKVEDCGVNTPLRKNVRDLLIENIVRFFPIEQSEKDNLKDAVLDKNRREEVKSFFRKHKTDEHIRKQVYDIADNKLSGRTVFCKEHILEHTEHSKEERKVFRLAPSLKTKIENVLAVIKDEILPKFTVNKVVMESNNFDIAAKTQGKKRLAKEEYGKGPREGKETRKEALLRETDGRCIYCGKSIDISNAHDDHIFPRKAGGLNIFANLVACCAVCNENKKGRTPLESGISPKPEIIAFMKNDLKKKILEDARNINTVDFNKYMSHASIGWRYMRDRLRESAGNKKLPIERQSGIYTAYFRRWWGFKKERGNTLHHALDAVILASRKGYSDDGLVDMTLKPKYNKGGEFDPEKHLPEPIEFKMDKGSRGSALHDRNPLSYKKGIITRRFMVTEIECGKEDDVISETYREKLKEAFKRFDTKKGKCLTDKEAKEAGFCIKKNELVMSLKCSIKGTGPGQMIRINNNVFKTNVHNVGVDVYLDEKGKKKAYERKNPRLSKHFIEPPPQPNGRVSFTLKRRDMVTVEGEDAIYRIKKLGTSPTIEAVVGSDGKTRTVSATKLTKANSAELESGGSSMSKTIKDLEEFAAEKLGYDIVFQESISMEPQEVEHLITTDEKSVLVNSTYDDNKEITISMISTPHPEYRPIALIIQDMEGEVQRKELGSGGSPKKKRKVPHPHSPTPDRTSVISHVSGV

SEQ ID NO: 908 - protein, 1117 aa, synthetic construct
MSSETGPAVVDPTLRRRIEPQEFEVFFDPRELRKETCLLYEISWGGRRSIWRHTSRNTDKHVEINFIEKLTSERSFRPSARCSITWFLSWSPCGECSKAITEFLSQHPNVTLFIYVARLYHHMDPGNRQGLRNLICRGVTVQIMTEQEYCYCWKNFVNYPPSNEVYWPRFPNVWMRLYMLELLCIILGLPPCLRILRRNQRQGTLFTLVFQRCHYQRIPPPIVWARGMSGTETPGTSESATPESMERELVLGIAYGGKYTGLAVVDRRHNQVLYANRLKMRDDVAGILKDRRKQRGIRRTAQTKKKRLRELKNYLKSIGYNESTATFETVYSLAHKRGYDYADMPEEKTSEEIEAMDVEERKQWEKEKQEWEETKRNSRHRKEVVKDVHKAMIEGRATEEQIKRVERIFNKQYRPKRFNNRILTKCKVEDCGVNTPLRKNVRDLLIENIVRFFPIEQSEKDNLKDAVLDKNRREEVKSFFRKHKTDEHIRKQVYDIADNKLSGRTVFCKEHILEHTEHSKEERKVFRLAPSLKTKIENVLAVIKDEILPKFTVNKVVMESNNFDIAAKTQGKKRLAKEEYGKGPREGKETRKEALLRETDGRCIYCGKSIDISNAHDDHIFPRKAGGLNIFANLVACCAVCNENKKGRTPLESGISPKPEIIAFMKNDLKKKILEDARNINTVDFNKYMSHASIGWRYMRDRLRESAGNKKLPIERQSGIYTAYFRRWWGFKKERGNTLHHALDAVILASRKGYSDDGLVDMTLKPKYNKGGEFDPEKHLPEPIEFKMDKGSRGSALHDRNPLSYKKGIITRRFMVTEIECGKEDDVISETYREKLKEAFKRFDTKKGKCLTDKEAKEAGFCIKKNELVMSLKCSIKGTGPGQMIRINNNVFKTNVHNVGVDVYLDEKGKKKAYERKNPRLSKHFIEPPPQPNGRVSFTLKRRDMVTVEGEDAIYRIKKLGTSPTIEAVVGSDGKTRTVSATKLTKANSAELESGGSSMSKTIKDLEEFAAEKLGYDIVFQESISMEPQEVEHLITTDEKSVLVNSTYDDNKEITISMISTPHPEYRPIALIIQDMEGEVQRKELGSGGSPKKKRKVPHPHSPTPDRTSVISHVSGV

SEQ ID NO: 909 - protein, 1125 aa, unidentified
MTSEKGPSTGDATLRRRIEPWEFEVFFNPGELRKETCMFYEIKWGTSQKIWRNSSKNTTNHVEVNFIEKFTAERHFCPSISCSITWFLSWSPCWECSKAIREFLSQHPNTTLVIYTARLFQHMDQQNRQGLRDLINSGVTVQIMTISEYCYCWRNFVNYSPKEETHWPKYQPLLMMLYALELHCIILSLPPCLKISRRYQKQLTFFNLILQNCHYQTIPPHILLSLGLIQPSVTWRSGTETPGTSESATPESMERELVLGIAYGGKYTGLAVVDRRHNQVLYANRLKMRDDVAGILKDRRKQRGIRRTAQTKKKRLRELKNYLKSIGYNESTATFETVYSLAHKRGYDYADMPEEKTSEEIEAMDVEERKQWEKEKQEWEETKRNSRHRKEVVKDVHKAMIEGRATEEQIKRVERIFNKQYRPKRFNNRILTKCKVEDCGVNTPLRKNVRDLLIENIVRFFPIEQSEKDNLKDAVLDKNRREEVKSFFRKHKTDEHIRKQVYDIADNKLSGRTVFCKEHILEHTEHSKEERKVFRLAPSLKTKIENVLAVIKDEILPKFTVNKVVMESNNFDIAAKTQGKKRLAKEEYGKGPREGKETRKEALLRETDGRCIYCGKSIDISNAHDDHIFPRKAGGLNIFANLVACCAVCNENKKGRTPLESGISPKPEIIAFMKNDLKKKILEDARNINTVDFNKYMSHASIGWRYMRDRLRESAGNKKLPIERQSGIYTAYFRRWWGFKKERGNTLHHALDAVILASRKGYSDDGLVDMTLKPKYNKGGEFDPEKHLPEPIEFKMDKGSRGSALHDRNPLSYKKGIITRRFMVTEIECGKEDDVISETYREKLKEAFKRFDTKKGKCLTDKEAKEAGFCIKKNELVMSLKCSIKGTGPGQMIRINNNVFKTNVHNVGVDVYLDEKGKKKAYERKNPRLSKHFIEPPPQPNGRVSFTLKRRDMVTVEGEDAIYRIKKLGTSPTIEAVVGSDGKTRTVSATKLTKANSAELESGGSSMSKTIKDLEEFAAEKLGYDIVFQESISMEPQEVEHLITTDEKSVLVNSTYDDNKEITISMISTPHPEYRPIALIIQDMEGEVQRKELGSGGSPKKKRKVPHPHSPTPDRTSVISHVSGV

SEQ ID NO: 910 - protein, 1117 aa, unidentified
MSSETGPAVVDPTLRRRIEPQEFEVFFDPRELRKETCLLYEISWGGRRSIWRHTSRNTDKHVEINFIEKLTSQRSFRPSARCSITWFLSWSPCGECSKAITEFLSQHPNVTLFIYVARLYHHMDPGNRQGLRNLICRGVTVQIMTEQEYCYCWKNFVNYPPSNEVYWPRFPNVWMRLYMLELLCIILGLPPCLRILRRNQRHDTLFTLVFQRCHYQRIPPPIIWARGMSGTETPGTSESATPESMERELVLGIAYGGKYTGLAVVDRRHNQVLYANRLKMRDDVAGILKDRRKQRGIRRTAQTKKKRLRELKNYLKSIGYNESTATFETVYSLAHKRGYDYADMPEEKTSEEIEAMDVEERKQWEKEKQEWEETKRNSRHRKEVVKDVHKAMIEGRATEEQIKRVERIFNKQYRPKRFNNRILTKCKVEDCGVNTPLRKNVRDLLIENIVRFFPIEQSEKDNLKDAVLDKNRREEVKSFFRKHKTDEHIRKQVYDIADNKLSGRTVFCKEHILEHTEHSKEERKVFRLAPSLKTKIENVLAVIKDEILPKFTVNKVVMESNNFDIAAKTQGKKRLAKEEYGKGPREGKETRKEALLRETDGRCIYCGKSIDISNAHDDHIFPRKAGGLNIFANLVACCAVCNENKKGRTPLESGISPKPEIIAFMKNDLKKKILEDARNINTVDFNKYMSHASIGWRYMRDRLRESAGNKKLPIERQSGIYTAYFRRWWGFKKERGNTLHHALDAVILASRKGYSDDGLVDMTLKPKYNKGGEFDPEKHLPEPIEFKMDKGSRGSALHDRNPLSYKKGIITRRFMVTEIECGKEDDVISETYREKLKEAFKRFDTKKGKCLTDKEAKEAGFCIKKNELVMSLKCSIKGTGPGQMIRINNNVFKTNVHNVGVDVYLDEKGKKKAYERKNPRLSKHFIEPPPQPNGRVSFTLKRRDMVTVEGEDAIYRIKKLGTSPTIEAVVGSDGKTRTVSATKLTKANSAELESGGSSMSKTIKDLEEFAAEKLGYDIVFQESISMEPQEVEHLITTDEKSVLVNSTYDDNKEITISMISTPHPEYRPIALIIQDMEGEVQRKELGSGGSPKKKRKVPHPHSPTPDRTSVISHVSGV

SEQ ID NO: 911 - protein, 1068 aa, unidentified
MRKETGMYISKAALKHNFNPHETPKDTYLLCKLQWGETGTPWIHWVRNERYHHAESYFLEKIFKMRRSSNYVKCNITWYLSWSPCADCCHKILNFLKRHSNVNIDIYVARLYYIEDEEIRQCLKNLVSLAEVTIAVMKIEDYIYCQKKFIQGGDDDDSWTVSFQPEISKNRLKLKDVFESGTETPGTSESATPESMERELVLGIAYGGKYTGLAVVDRRHNQVLYANRLKMRDDVAGILKDRRKQRGIRRTAQTKKKRLRELKNYLKSIGYNESTATFETVYSLAHKRGYDYADMPEEKTSEEIEAMDVEERKQWEKEKQEWEETKRNSRHRKEVVKDVHKAMIEGRATEEQIKRVERIFNKQYRPKRFNNRILTKCKVEDCGVNTPLRKNVRDLLIENIVRFFPIEQSEKDNLKDAVLDKNRREEVKSFFRKHKTDEHIRKQVYDIADNKLSGRTVFCKEHILEHTEHSKEERKVFRLAPSLKTKIENVLAVIKDEILPKFTVNKVVMESNNFDIAAKTQGKKRLAKEEYGKGPREGKETRKEALLRETDGRCIYCGKSIDISNAHDDHIFPRKAGGLNIFANLVACCAVCNENKKGRTPLESGISPKPEIIAFMKNDLKKKILEDARNINTVDFNKYMSHASIGWRYMRDRLRESAGNKKLPIERQSGIYTAYFRRWWGFKKERGNTLHHALDAVILASRKGYSDDGLVDMTLKPKYNKGGEFDPEKHLPEPIEFKMDKGSRGSALHDRNPLSYKKGIITRRFMVTEIECGKEDDVISETYREKLKEAFKRFDTKKGKCLTDKEAKEAGFCIKKNELVMSLKCSIKGTGPGQMIRINNNVFKTNVHNVGVDVYLDEKGKKKAYERKNPRLSKHFIEPPPQPNGRVSFTLKRRDMVTVEGEDAIYRIKKLGTSPTIEAVVGSDGKTRTVSATKLTKANSAELESGGSSMSKTIKDLEEFAAEKLGYDIVFQESISMEPQEVEHLITTDEKSVLVNSTYDDNKEITISMISTPHPEYRPIALIIQDMEGEVQRKELGSGGSPKKKRKVPHPHSPTPDRTSVISHVSGV

SEQ ID NO: 912 - protein, 1072 aa, synthetic construct
MYKKKLRGMYMSKKAFKYHFDPRESPRATYLLCVIQWGCNGLPWIHWVKNGRSHAERYFLQKVFKMRRSNNNINCSITLYLSWSPCRNCCYEMQYFLKKHPNVNICIYLARLYYTEDEEICKALKDLSEKKVIISVMKIEDYIYCWKTFVSGNAAAGSWFKDFESQINKNHFQLKRILEVSPLSGTETPGTSESATPESMERELVLGIAYGGKYTGLAVVDRRHNQVLYANRLKMRDDVAGILKDRRKQRGIRRTAQTKKKRLRELKNYLKSIGYNESTATFETVYSLAHKRGYDYADMPEEKTSEEIEAMDVEERKQWEKEKQEWEETKRNSRHRKEVVKDVHKAMIEGRATEEQIKRVERIFNKQYRPKRFNNRILTKCKVEDCGVNTPLRKNVRDLLIENIVRFFPIEQSEKDNLKDAVLDKNRREEVKSFFRKHKTDEHIRKQVYDIADNKLSGRTVFCKEHILEHTEHSKEERKVFRLAPSLKTKIENVLAVIKDEILPKFTVNKVVMESNNFDIAAKTQGKKRLAKEEYGKGPREGKETRKEALLRETDGRCIYCGKSIDISNAHDDHIFPRKAGGLNIFANLVACCAVCNENKKGRTPLESGISPKPEIIAFMKNDLKKKILEDARNINTVDFNKYMSHASIGWRYMRDRLRESAGNKKLPIERQSGIYTAYFRRWWGFKKERGNTLHHALDAVILASRKGYSDDGLVDMTLKPKYNKGGEFDPEKHLPEPIEFKMDKGSRGSALHDRNPLSYKKGIITRRFMVTEIECGKEDDVISETYREKLKEAFKRFDTKKGKCLTDKEAKEAGFCIKKNELVMSLKCSIKGTGPGQMIRINNNVFKTNVHNVGVDVYLDEKGKKKAYERKNPRLSKHFIEPPPQPNGRVSFTLKRRDMVTVEGEDAIYRIKKLGTSPTIEAVVGSDGKTRTVSATKLTKANSAELESGGSSMSKTIKDLEEFAAEKLGYDIVFQESISMEPQEVEHLITTDEKSVLVNSTYDDNKEITISMISTPHPEYRPIALIIQDMEGEVQRKELGSGGSPKKKRKVPHPHSPTPDRTSVISHVSGV

SEQ ID NO: 913 - protein, 1082 aa, unidentified
MAAVSARGPSSRENNQGWKMQPEDFQRNYSPRQNGRVYLLYEIRWRSSSIWRNWCSNNPEQHAEVNFLENHFNNQPQTPCCITWFLSASPCGNCCRRILKFLRSHPNVTLVICAAKLFRHLDIRNRRGLRSLMMNGVAIRIMNLEDYRYCWRNFVAHQPGQDDYWPQNVTLYFILNSIELLHIFLDLPPFLANSGTETPGTSESATPESMERELVLGIAYGGKYTGLAVVDRRHNQVLYANRLKMRDDVAGILKDRRKQRGIRRTAQTKKKRLRELKNYLKSIGYNESTATFETVYSLAHKRGYDYADMPEEKTSEEIEAMDVEERKQWEKEKQEWEETKRNSRHRKEVVKDVHKAMIEGRATEEQIKRVERIFNKQYRPKRFNNRILTKCKVEDCGVNTPLRKNVRDLLIENIVRFFPIEQSEKDNLKDAVLDKNRREEVKSFFRKHKTDEHIRKQVYDIADNKLSGRTVFCKEHILEHTEHSKEERKVFRLAPSLKTKIENVLAVIKDEILPKFTVNKVVMESNNFDIAAKTQGKKRLAKEEYGKGPREGKETRKEALLRETDGRCIYCGKSIDISNAHDDHIFPRKAGGLNIFANLVACCAVCNENKKGRTPLESGISPKPEIIAFMKNDLKKKILEDARNINTVDFNKYMSHASIGWRYMRDRLRESAGNKKLPIERQSGIYTAYFRRWWGFKKERGNTLHHALDAVILASRKGYSDDGLVDMTLKPKYNKGGEFDPEKHLPEPIEFKMDKGSRGSALHDRNPLSYKKGIITRRFMVTEIECGKEDDVISETYREKLKEAFKRFDTKKGKCLTDKEAKEAGFCIKKNELVMSLKCSIKGTGPGQMIRINNNVFKTNVHNVGVDVYLDEKGKKKAYERKNPRLSKHFIEPPPQPNGRVSFTLKRRDMVTVEGEDAIYRIKKLGTSPTIEAVVGSDGKTRTVSATKLTKANSAELESGGSSMSKTIKDLEEFAAEKLGYDIVFQESISMEPQEVEHLITTDEKSVLVNSTYDDNKEITISMISTPHPEYRPIALIIQDMEGEVQRKELGSGGSPKKKRKVPHPHSPTPDRTSVISHVSGV

SEQ ID NO: 914 - protein, 1263 aa, unidentified
MYRRKMRGMYISKRALRIHFDPCKFPKETYLLCELQWRGSTKFWQHWVRNDHDYEDCHAEQYFLDEVFEPRSYNICDMTWYLSWSPCRECCDIIRDFLEEQPNVNIDIRVARLYYTNIPRYRDGLRELHSLEGVTIKAMEAEDYNYCWETFIQPGVNYYFSPNNFKSEIQRNRTKLEDILQGLHLYARITVLLVLFFRWKMQPRDFQRNYSPRQNGRVYLLYEIRWRRGSIWRNWCSNNHEQHAEVNFLENHFSVRPQTPCSITWFLSTSPCGKCSRRILEFLRSHPNVTLVIYAAKLFRHHDNRNRQGLRNLIMNGVTLRIMNLEDYRYCWRNFVAYQTGEDDYWPQNVTLYFLLNSTELLHIFWGLPPFLANSGTETPGTSESATPESMERELVLGIAYGGKYTGLAVVDRRHNQVLYANRLKMRDDVAGILKDRRKQRGIRRTAQTKKKRLRELKNYLKSIGYNESTATFETVYSLAHKRGYDYADMPEEKTSEEIEAMDVEERKQWEKEKQEWEETKRNSRHRKEVVKDVHKAMIEGRATEEQIKRVERIFNKQYRPKRFNNRILTKCKVEDCGVNTPLRKNVRDLLIENIVRFFPIEQSEKDNLKDAVLDKNRREEVKSFFRKHKTDEHIRKQVYDIADNKLSGRTVFCKEHILEHTEHSKEERKVFRLAPSLKTKIENVLAVIKDEILPKFTVNKVVMESNNFDIAAKTQGKKRLAKEEYGKGPREGKETRKEALLRETDGRCIYCGKSIDISNAHDDHIFPRKAGGLNIFANLVACCAVCNENKKGRTPLESGISPKPEIIAFMKNDLKKKILEDARNINTVDFNKYMSHASIGWRYMRDRLRESAGNKKLPIERQSGIYTAYFRRWWGFKKERGNTLHHALDAVILASRKGYSDDGLVDMTLKPKYNKGGEFDPEKHLPEPIEFKMDKGSRGSALHDRNPLSYKKGIITRRFMVTEIECGKEDDVISETYREKLKEAFKRFDTKKGKCLTDKEAKEAGFCIKKNELVMSLKCSIKGTGPGQMIRINNNVFKTNVHNVGVDVYLDEKGKKKAYERKNPRLSKHFIEPPPQPNGRVSFTLKRRDMVTVEGEDAIYRIKKLGTSPTIEAVVGSDGKTRTVSATKLTKANSAELESGGSSMSKTIKDLEEFAAEKLGYDIVFQESISMEPQEVEHLITTDEKSVLVNSTYDDNKEITISMISTPHPEYRPIALIIQDMEGEVQRKELGSGGSPKKKRKVPHPHSPTPDRTSVISHVSGV

SEQ ID NO: 915 - protein, 1094 aa, unidentified
MERSSGRDWLDECCPRGCKYTSNYRGPMKGLFQKAFYFHFENLHYADHRRKTFLCFEVTRLQDNKFRKGMFINQVGPYRLHAELRFLSWFHDSWLCPYASYEVTWYMSWSPCEECMEELAAFLANHRNVTLTIYVARLYYYQEPTCGEGLQALLNEGASVNIMFFRDFLDCWRRFVYNGNEYFEPWPHLHQNSLKYFHILEELLESGTETPGTSESATPESMERELVLGIAYGGKYTGLAVVDRRHNQVLYANRLKMRDDVAGILKDRRKQRGIRRTAQTKKKRLRELKNYLKSIGYNESTATFETVYSLAHKRGYDYADMPEEKTSEEIEAMDVEERKQWEKEKQEWEETKRNSRHRKEVVKDVHKAMIEGRATEEQIKRVERIFNKQYRPKRFNNRILTKCKVEDCGVNTPLRKNVRDLLIENIVRFFPIEQSEKDNLKDAVLDKNRREEVKSFFRKHKTDEHIRKQVYDIADNKLSGRTVFCKEHILEHTEHSKEERKVFRLAPSLKTKIENVLAVIKDEILPKFTVNKVVMESNNFDIAAKTQGKKRLAKEEYGKGPREGKETRKEALLRETDGRCIYCGKSIDISNAHDDHIFPRKAGGLNIFANLVACCAVCNENKKGRTPLESGISPKPEIIAFMKNDLKKKILEDARNINTVDFNKYMSHASIGWRYMRDRLRESAGNKKLPIERQSGIYTAYFRRWWGFKKERGNTLHHALDAVILASRKGYSDDGLVDMTLKPKYNKGGEFDPEKHLPEPIEFKMDKGSRGSALHDRNPLSYKKGIITRRFMVTEIECGKEDDVISETYREKLKEAFKRFDTKKGKCLTDKEAKEAGFCIKKNELVMSLKCSIKGTGPGQMIRINNNVFKTNVHNVGVDVYLDEKGKKKAYERKNPRLSKHFIEPPPQPNGRVSFTLKRRDMVTVEGEDAIYRIKKLGTSPTIEAVVGSDGKTRTVSATKLTKANSAELESGGSSMSKTIKDLEEFAAEKLGYDIVFQESISMEPQEVEHLITTDEKSVLVNSTYDDNKEITISMISTPHPEYRPIALIIQDMEGEVQRKELGSGGSPKKKRKVPHPHSPTPDRTSVISHVSGV

SEQ ID NO: 916 - protein, 1096 aa, unidentified
MEASPASRPRPLMGPRTFTENFTNNPEVFGRHQTYLCYEVKCQGPDGTRDLMTEQRDFLCNQARNLLSGFDGRHAERCFLDRVPSWRLDPAQTYRVTCFISWSPCFSCAREVAEFLQENPHVNLRIFAARIYDCRPRYEEGLQMLQNAGAQVSIMTSEEFRHCWDTFVDHQGHPFQPWEGLDEHSQALSRRLQAILQGNRWMILSLGSGTETPGTSESATPESMERELVLGIAYGGKYTGLAVVDRRHNQVLYANRLKMRDDVAGILKDRRKQRGIRRTAQTKKKRLRELKNYLKSIGYNESTATFETVYSLAHKRGYDYADMPEEKTSEEIEAMDVEERKQWEKEKQEWEETKRNSRHRKEVVKDVHKAMIEGRATEEQIKRVERIFNKQYRPKRFNNRILTKCKVEDCGVNTPLRKNVRDLLIENIVRFFPIEQSEKDNLKDAVLDKNRREEVKSFFRKHKTDEHIRKQVYDIADNKLSGRTVFCKEHILEHTEHSKEERKVFRLAPSLKTKIENVLAVIKDEILPKFTVNKVVMESNNFDIAAKTQGKKRLAKEEYGKGPREGKETRKEALLRETDGRCIYCGKSIDISNAHDDHIFPRKAGGLNIFANLVACCAVCNENKKGRTPLESGISPKPEIIAFMKNDLKKKILEDARNINTVDFNKYMSHASIGWRYMRDRLRESAGNKKLPIERQSGIYTAYFRRWWGFKKERGNTLHHALDAVILASRKGYSDDGLVDMTLKPKYNKGGEFDPEKHLPEPIEFKMDKGSRGSALHDRNPLSYKKGIITRRFMVTEIECGKEDDVISETYREKLKEAFKRFDTKKGKCLTDKEAKEAGFCIKKNELVMSLKCSIKGTGPGQMIRINNNVFKTNVHNVGVDVYLDEKGKKKAYERKNPRLSKHFIEPPPQPNGRVSFTLKRRDMVTVEGEDAIYRIKKLGTSPTIEAVVGSDGKTRTVSATKLTKANSAELESGGSSMSKTIKDLEEFAAEKLGYDIVFQESISMEPQEVEHLITTDEKSVLVNSTYDDNKEITISMISTPHPEYRPIALIIQDMEGEVQRKELGSGGSPKKKRKVPHPHSPTPDRTSVISHVSGV

SEQ ID NO: 917 - DNA, 96 bp, synthetic construct
  source 1..96: mol_type = other DNA
ggcccagactgagcacgtgagttttagagctagaaatagcaagttaaaataaggctagtccgttatcaacttgaaaaagtggcaccgagtcggtgc

SEQ ID NO: 918 - DNA, 96 bp, synthetic construct
  source 1..96: mol_type = other DNA
ttgccacgaagcaggccaatgttttagagctagaaatagcaagttaaaataaggctagtccgttatcaacttgaaaaagtggcaccgagtcggtgc

SEQ ID NO: 919 - DNA, 97 bp, synthetic construct
  source 1..97: mol_type = other DNA
ccccggggccgccattgacaggttttagagctagaaatagcaagttaaaataaggctagtccgttatcaacttgaaaaagtggcaccgagtcggtgc

SEQ ID NO: 920 - DNA, 96 bp, synthetic construct
  source 1..96: mol_type = other DNA
tccggctctgagggccagtggttttagagctagaaatagcaagttaaaataaggctagtccgttatcaacttgaaaaagtggcaccgagtcggtgc

SEQ ID NO: 921 - DNA, 96 bp, synthetic construct
  source 1..96: mol_type = other DNA
caaccagtccccagtgactcgttttagagctagaaatagcaagttaaaataaggctagtccgttatcaacttgaaaaagtggcaccgagtcggtgc

SEQ ID NO: 922 - DNA, 106 bp, synthetic construct
  source 1..106: mol_type = other DNA
gattccggctctgagggccagtgttgagaatcgaaagattcttaataaggcatccttccgatgctgacttctcaccgtccgttttccaataggagcgggcggtatg

SEQ ID NO: 923 - DNA, 106 bp, synthetic construct
  source 1..106: mol_type = other DNA
gcccttctgtttgtcccacttggttgagaatcgaaagattcttaataaggcatccttccgatgctgacttctcaccgtccgttttccaataggagcgggcggtatg

SEQ ID NO: 924 - DNA, 106 bp, synthetic construct
  source 1..106: mol_type = other DNA
ttggccaagccaggcctagaatgttgagaatcgaaagattcttaataaggcatccttccgatgctgacttctcaccgtccgttttccaataggagcgggcggtatg

SEQ ID NO: 925 - DNA, 106 bp, synthetic construct
  source 1..106: mol_type = other DNA
ctcagctggtacacggcagggtgttgagaatcgaaagattcttaataaggcatccttccgatgctgacttctcaccgtccgttttccaataggagcgggcggtatg

SEQ ID NO: 926 - DNA, 106 bp, synthetic construct
  source 1..106: mol_type = other DNA
tcgcctatgggaactctggagggttgagaatcgaaagattcttaataaggcatccttccgatgctgacttctcaccgtccgttttccaataggagcgggcggtatg

SEQ ID NO: 927 - DNA, 139 bp, synthetic construct
  source 1..139: mol_type = other DNA
gaacacaaagcatagactgcgttacagttaagaaattaattgtaaaacgcctatacagtgaagggatatacgcttgggtttgtccagcctgagcctctatgccagaaatggcgccttcatcgtgggttaggacatttaa

SEQ ID NO: 928 - DNA, 139 bp, synthetic construct
  source 1..139: mol_type = other DNA
gggaaagacccagcatccgtgttacagttaagaaattaattgtaaaacgcctatacagtgaagggatatacgcttgggtttgtccagcctgagcctctatgccagaaatggcgccttcatcgtgggttaggacatttaa

SEQ ID NO: 929 - DNA, 139 bp, synthetic construct
  source 1..139: mol_type = other DNA
gatgagaaggagaagttcttgttacagttaagaaattaattgtaaaacgcctatacagtgaagggatatacgcttgggtttgtccagcctgagcctctatgccagaaatggcgccttcatcgtgggttaggacatttaa

SEQ ID NO: 930 - DNA, 139 bp, synthetic construct
  source 1..139: mol_type = other DNA
agcaaacgcgttcagggcctgttacagttaagaaattaattgtaaaacgcctatacagtgaagggatatacgcttgggtttgtccagcctgagcctctatgccagaaatggcgccttcatcgtgggttaggacatttaa

SEQ ID NO: 931 - DNA, 140 bp, synthetic construct
  source 1..140: mol_type = other DNA
ggtcgtagccagtccgaacccgttacagttaagaaattaattgtaaaacgcctatacagtgaagggatatacgcttgggtttgtccagcctgagcctctatgccagaaatggcgccttcatcgtgggttaggacatttaa

SEQ ID NO: 932 - DNA, 20 bp, synthetic construct
  source 1..20: mol_type = other DNA
gcatgcatttgtaggcttga

SEQ ID NO: 933 - DNA, 19 bp, synthetic construct
  source 1..19: mol_type = other DNA
ccctgtctaggaaaagctg

SEQ ID NO: 934 - DNA, 18 bp, synthetic construct
  source 1..18: mol_type = other DNA
ggaggaggaagggcctga

SEQ ID NO: 935 - DNA, 18 bp, synthetic construct
  source 1..18: mol_type = other DNA
actctgccctcgtgggtt

SEQ ID NO: 936 - DNA, 18 bp, synthetic construct
  source 1..18: mol_type = other DNA
gactctggccactccctg

SEQ ID NO: 937 - DNA, 18 bp, synthetic construct
  source 1..18: mol_type = other DNA
caggcaggctctccgagg

SEQ ID NO: 938 - DNA, 26 bp, synthetic construct
  source 1..26: mol_type = other DNA
aataaaagtctctctcttaatgacac

SEQ ID NO: 939 - DNA, 18 bp, synthetic construct
  source 1..18: mol_type = other DNA
gaccccctccaccagtac

SEQ ID NO: 940 - DNA, 18 bp, synthetic construct
  source 1..18: mol_type = other DNA
cacctgtccttggagaac

SEQ ID NO: 941 - DNA, 18 bp, synthetic construct
  source 1..18: mol_type = other DNA
ggcaggtgaacacaagag

SEQ ID NO: 942 - DNA, 27 bp, synthetic construct
  source 1..27: mol_type = other DNA
aataataaaagtctctctcttaatgac

SEQ ID NO: 943 - DNA, 18 bp, synthetic construct
  source 1..18: mol_type = other DNA
accccctccaccagtacc

SEQ ID NO: 944 - DNA, 18 bp, synthetic construct
  source 1..18: mol_type = other DNA
ctcagggcctcctcagcc

SEQ ID NO: 945 - DNA, 18 bp, synthetic construct
  source 1..18: mol_type = other DNA
gtctggatgtcgtaaggg

SEQ ID NO: 946 - DNA, 22 bp, synthetic construct
  source 1..22: mol_type = other DNA
ggggtgtaactcagaatgtttt

SEQ ID NO: 947 - DNA, 18 bp, synthetic construct
  source 1..18: mol_type = other DNA
gggagtgagactcagaga

SEQ ID NO: 948 - DNA, 21 bp, synthetic construct
  source 1..21: mol_type = other DNA
gcaaagagggaaatgagatca

SEQ ID NO: 949 - DNA, 23 bp, synthetic construct
  source 1..23: mol_type = other DNA
gtgacacatttgtttgagaatca

SEQ ID NO: 950 - DNA, 18 bp, synthetic construct
  source 1..18: mol_type = other DNA
ctttatccccgcacagag

SEQ ID NO: 951 - DNA, 18 bp, synthetic construct
  source 1..18: mol_type = other DNA
cttggcccatgggaaatc

SEQ ID NO: 952 - DNA, 18 bp, synthetic construct
  source 1..18: mol_type = other DNA
ctggctgagctaactgtg

SEQ ID NO: 953 - DNA, 21 bp, synthetic construct
  source 1..21: mol_type = other DNA
aactgtgcgtatgacatcatc

SEQ ID NO: 954 - DNA, 18 bp, synthetic construct
  source 1..18: mol_type = other DNA
catgcgccggcacgcccc

SEQ ID NO: 955 - DNA, 18 bp, synthetic construct
  source 1..18: mol_type = other DNA
gggtctctagaccagcgt

SEQ ID NO: 956 - DNA, 23 bp, synthetic construct
  source 1..23: mol_type = other DNA
aagacatgaaaatgtgcttgatg

SEQ ID NO: 957 - DNA, 18 bp, synthetic construct
  source 1..18: mol_type = other DNA
ctgaggagggcccccctg

SEQ ID NO: 958 - DNA, 18 bp, synthetic construct
  source 1..18: mol_type = other DNA
tccagctccagccccaga

SEQ ID NO: 959 - DNA, 26 bp, synthetic construct
  source 1..26: mol_type = other DNA
aacaaaagagaggagttaatgaatta

SEQ ID NO: 960 - DNA, 18 bp, synthetic construct
  source 1..18: mol_type = other DNA
cacccggctgctggaata

SEQ ID NO: 961 - protein, 18 aa, synthetic construct
TGTGTGTGTGTGTAGGGC

SEQ ID NO: 962 - DNA, 476 bp, synthetic construct; identical to SEQ ID NO: 708
  source 1..476: mol_type = other DNA

SEQ ID NO: 963 - DNA, 22 bp, synthetic construct
  source 1..22: mol_type = other DNA
ggggatccaccggagcttaaga

SEQ ID NO: 964 - DNA, 22 bp, synthetic construct
  source 1..22: mol_type = other DNA
tccaccggagcttaagacggga

SEQ ID NO: 965 - DNA, 22 bp, synthetic construct
  source 1..22: mol_type = other DNA
cggagcttaagacgggactagg

SEQ ID NO: 966 - DNA, 22 bp, synthetic construct
  source 1..22: mol_type = other DNA
cttaagacgggactaggtcagg

SEQ ID NO: 967 - DNA, 22 bp, synthetic construct
  source 1..22: mol_type = other DNA
gacgggactaggtcaggccggg

SEQ ID NO: 968 - protein, 1694 aa, unidentified
MEASPASRPRPLMGPRTFTENFTNNPEVFGRHQTYLCYEVKCQGPDGTRDLMTEQRDFLCNQARNLLSGFDGRHAERCFLDRVPSWRLDPAQTYRVTCFISWSPCFSCAREVAEFLQENPHVNLRIFAARIYDCRPRYEEGLQMLQNAGAQVSIMTSEEFRHCWDTFVDHQGHPFQPWEGLDEHSQALSRRLQAILQGNRWMILSLGSGSETPGTSESATPESDKKYSIGLAIGTNSVGWAVITDEYKVPSKKFKVLGNTDRHSIKKNLIGALLFDSGETAEATRLKRTARRRYTRRKNRICYLQEIFSNEMAKVDDSFFHRLEESFLVEEDKKHERHPIFGNIVDEVAYHEKYPTIYHLRKKLVDSTDKADLRLIYLALAHMIKFRGHFLIEGDLNPDNSDVDKLFIQLVQTYNQLFEENPINASGVDAKAILSARLSKSRRLENLIAQLPGEKKNGLFGNLIALSLGLTPNFKSNFDLAEDAKLQLSKDTYDDDLDNLLAQIGDQYADLFLAAKNLSDAILLSDILRVNTEITKAPLSASMIKRYDEHHQDLTLLKALVRQQLPEKYKEIFFDQSKNGYAGYIDGGASQEEFYKFIKPILEKMDGTEELLVKLNREDLLRKQRTFDNGSIPHQIHLGELHAILRRQEDFYPFLKDNREKIEKILTFRIPYYVGPLARGNSRFAWMTRKSEETITPWNFEEVVDKGASAQSFIERMTNFDKNLPNEKVLPKHSLLYEYFTVYNELTKVKYVTEGMRKPAFLSGEQKKAIVDLLFKTNRKVTVKQLKEDYFKKIECFDSVEISGVEDRFNASLGTYHDLLKIIKDKDFLDNEENEDILEDIVLTLTLFEDREMIEERLKTYAHLFDDKVMKQLKRRRYTGWGRLSRKLINGIRDKQSGKTILDFLKSDGFANRNFMQLIHDDSLTFKEDIQKAQVSGQGDSLHEHIANLAGSPAIKKGILQTVKVVDELVKVMGRHKPENIVIEMARENQTTQKGQKNSRERMKRIEEGIKELGSQILKEHPVENTQLQNEKLYLYYLQNGRDMYVDQELDINRLSDYDVDHIVPQSFLKDDSIDNKVLTRSDKNRGKSDNVPSEEVVKKMKNYWRQLLNAKLITQRKFDNLTKAERGGLSELDKAGFIKRQLVETRQITKHVAQILDSRMNTKYDENDKLIREVKVITLKSKLVSDFRKDFQFYKVREINNYHHAHDAYLNAVVGTALIKKYPKLESEFVYGDYKVYDVRKMIAKSEQEIGKATAKYFFYSNIMNFFKTEITLANGEIRKRPLIETNGETGEIVWDKGRDFATVRKVLSMPQVNIVKKTEVQTGGFSKESILPKRNSDKLIARKKDWDPKKYGGFDSPTVAYSVLVVAKVEKGKSKKLKSVKELLGITIMERSSFEKNPIDFLEAKGYKEVKKDLIIKLPKYSLFELENGRKRMLASAGELQKGNELALPSKYVNFLYLASHYEKLKGSPEDNEQKQLFVEQHKHYLDEIIEQISEFSKRVILADANLDKVLSAYNKHRDKPIREQAENIIHLFTLTNLGAPAAFKYFDTTIDRKRYTSTKEVLDATLIHQSITGLYETRIDLSQLGGDSGGSSMSKTIKDLEEFAAEKLGYDIVFQESISMEPQEVEHLITTDEKSVLVNSTYDDNKEITISMISTPHPEYRPIALIIQDMEGEVQRKELGSGGSPKKKRKV

SEQ ID NO: 969 - protein, 1461 aa, unidentified
MEASPASRPRPLMGPRTFTENFTNNPEVFGRHQTYLCYEVKCQGPDGTRDLMTEQRDFLCNQARNLLSGFDGRHAERCFLDRVPSWRLDPAQTYRVTCFISWSPCFSCAREVAEFLQENPHVNLRIFAARIYDCRPRYEEGLQMLQNAGAQVSIMTSEEFRHCWDTFVDHQGHPFQPWEGLDEHSQALSRRLQAILQGNRWMILSLGSGSETPGTSESATPESMSTDMKNYRIGVAVGDRSVGLAAIEFDDDGLPIQKLALVTFRHDGGLDPTKNKTPMSRKETRGIARRTMRMNRERKRRLRNLDNVLENLGYSVPEGPEPETYEAWTSRALLASIKLASADELNEHLVRAVRHMARHRGWANPWWSLDQLEKASQEPSETFEIILARARELFGEKVPANPTLGMLGALAANNEVLLRPRDEKKRKTGYVRGTPLMFAQVRQGDQLAELRRICEVQGIEDQYEALRLGVFDHKHPYVPKERVGKDPLNPSTNRTIRASLEFQEFRILDSVANLRVRIGSRAKRELTEAEYDAAVEFLMDYADKEQPSWADVAEKIGVPGNRLVAPVLEDVQQKTAPYDRSSAAFEKAMGKKTEARQWWESTDDDQLRSLLIAFLVDATNDTEEAAAEAGLSELYKSWPAEEREALSNIDFEKGRVAYSQETLSKLSEYMHEYRVGLHEARKAVFGVDDTWRPPLDKLEEPTGQPAVDRVLTILRRFVLDCERQWGRPRAITVEHTRTGLMGPTQRQKILNEQKKNRADNERIRDELRESGVDNPSRAEVRRHLIVQEQECQCLYCGTMITTTTSELDHIVPRAGGGSSRRENLAAVCRACNAKKKRELFYAWAGPVKSQETIERVRQLKAFKDSKKAKMFKNQIRRLNQTEADEPIDERSLASTSYAAVAVRERLEQHFNEGLALDDKSRVVLDVYAGAVTRESRRAGGIDERILLRGERDKNRFDVRHHAVDAAVMTLLNRSVALTLEQRSQLRRTFYEQGLDKLDRNQLKPEEDWRDFTGLAPASQEKFLEWRKAATILGDLLAEAIEDDSIAVVSPLRLRPQNGSVHLETISAVKKQTLGSDWPADAVKRIVDPEIYLAMKDALGKLKELPEDSARSLELPDGRFVEADDEVLFFPENAASILTPRGVAEIGGSIHHARLYGWLTKKGELKVGMLRVYGAEFPWLMRESGSRNVLSMPIHRGSQSFRDMQDTTRKAVESGEAVEFAWITQNDELEFDPDDYIAHGGKDELRQFLGFMPECRWRVDGFKKNYQIRIRPAMLSREQLPSDIQRRLESKTLTKNESLLLKALDTGLVVAIGGLLPLETLKVIRRNNLGFPRWRGNGNLPTSFEVRSSALRALGVEGSGGSSMSKTIKDLEEFAAEKLGYDIVFQESISMEPQEVEHLITTDEKSVLVNSTYDDNKEITISMISTPHPEYRPIALIIQDMEGEVQRKELGSGGSPKKKRKV

SEQ ID NO: 970 - protein, 359 aa, unidentified; identical to SEQ ID NO: 650

SEQ ID NO: 971 - protein, 245 aa, unidentified; identical to SEQ ID NO: 667

SEQ ID NO: 972 - protein, 236 aa, unidentified; identical to SEQ ID NO: 668

SEQ ID NO: 973 - protein, 229 aa, unidentified; identical to SEQ ID NO: 669

SEQ ID NO: 974 - protein, 228 aa, unidentified; identical to SEQ ID NO: 670

SEQ ID NO: 975 - protein, 228 aa, unidentified; identical to SEQ ID NO: 671

SEQ ID NO: 976 - protein, 236 aa, unidentified; identical to SEQ ID NO: 673

SEQ ID NO: 977 - protein, 228 aa, unidentified; identical to SEQ ID NO: 675

SEQ ID NO: 978 - protein, 179 aa, unidentified; identical to SEQ ID NO: 615

SEQ ID NO: 979 - protein, 183 aa, unidentified; identical to SEQ ID NO: 618

SEQ ID NO: 980 - protein, 193 aa, unidentified; identical to SEQ ID NO: 606

SEQ ID NO: 981 - protein, 374 aa, unidentified; identical to SEQ ID NO: 630

SEQ ID NO: 982 - protein, 205 aa, unidentified; identical to SEQ ID NO: 663

SEQ ID NO: 983 - protein, 149 aa, unidentified
MEEALRQAERAAEGGEVPIGAVVLKDGKILARAHNQVELLKDATAHAEMIALTSAASALDNWRLEGCDVVVTLEPCAMCAGAMVNSRVARIVYGATDPVAGACGSVFDVVSDTRLNHRIPVVRGVLADRCGALLKDFFRSRRTQQSPKS

SEQ ID NO: 984 - protein, 161 aa, unidentified
MTDEQLMRAAIREAAKAGALGETPIGCVIAKEGKIIARGYNRRMTDRQTLAHAELFALRKACKKEGDWRLEDCTLYVTLEPCPMCAGAIVQARIPRVVYGASNPKAGCAGSVLNLLDEPRFNHQVCVEAGVLGDTCAALMRDFFRELRAKRKAEQSEKQEL

SEQ ID NO: 985 - protein, 148 aa, unidentified
MDYEKYMDLALEQAQIAYNSNEVPIGCIIVYNNEVIGKGCNLRVTKGNVLAHAEIIAINEACNFMGDWRLENCTLFVTVEPCPMCAGAILQARVKEVVFGTRNPKAGCVGSVYNLLQDSRFNHQVEITEGVRQEECASIMKDFFKRFR

SEQ ID NO: 986 - protein, 206 aa, unidentified
MDVPLYDPRGPPATLVYDPCVDGLDTDEDFMRLALAEARRAAAEDEVPIGAVLVRGGRVLARDRNRRERLHDPTAHAEMLVITASAAEIESWRLEDSTLYVTLEPCAMCAGAIVLARIPRVVFGAFDPKAGAAGSVLDVLRHARLNHRAEVVGGVLAPECGGLIAEFFAAKRVAAKRAGAGRTRSSPAGGDPPGGEPTGGEPTATT

SEQ ID NO: 987 - protein, 161 aa, unidentified
MESTEEQDIKYMREAVNEASKAIESGEVPIGCVIVYKDEIIGRGHNLRNSKKNPLCHAEISAINEAAGFMGDWRLEECTLYVTVEPCPMCAGAIVQARIPRVVFGTPNVKAGCAGSILNILNEPKFNHQVDVTCGVLREECAAPMSEFFKRFRKKNKETCC

SEQ ID NO: 988 - protein, 216 aa, unidentified
MILLVNIKIMENFKNCDTRADFGDSEYSGLLSAPRKSFPECPFEPMRPSYLNRGDEFFMKLAYNQALKAWSCGEVPIGAVIELGGEVVAQAHNSVESSRDPTAHAEIIAITQAAAKCEDWRLSGATLYVTKEPCPMCAGACVMSRLKRVVYAVSDPKMGFLGGAMKFHDLPTLNHSLIVNSGVLEEDCARLLKTFFSLKRAISKSAKASSSQSGAE

SEQ ID NO: 989 - protein, 159 aa, unidentified
MNDTIYMKEAIEEARRALECGEIPVGAVVVRGEEIIGRGHNVRSRDKSPFGHAEIAAMTEAAKKINSWRFDGCSIYVTLEPCVMCSGALVQCRMGRIVFGARDPKAGGCRSLYEIPRDPRMYHRCGLTGGVLSEECAEMLRIFFRERRKAGIIKKTAPL

SEQ ID NO: 990 - protein, 175 aa, unidentified
MNDSGLIIDRQSDAYYMGQALREARKAYAAGEVPIGAVIVKAGAIISRGWNQVEMLKDGTAHAEMLALTAAEESVGDRRLEGCTLYVTKEPCVMCAGAIILCRPDRVVFGCPDPKVGAVGGWINVLESSPPFNHRCEVTSGVLGEECLFLLQTFFREARDRKKIERIPSISDEEA

SEQ ID NO: 991 - protein, 174 aa, unidentified
MSPEELRFHQHFMRLALREAEKSVAADEVPCGCVIVELPEGCYDPAIAHPPPPDHPWSARILSRGYNQVEMLNDPTAHAEMIAITSATSTLGDRRLNRTALYVTKEPCPMCAGAIVWARPAVVVWGLSDPDRGGESLFKILSSPKTNHRPKIFTGILEAECKTQFTDFFKARRK

SEQ ID NO: 992 - protein, 178 aa, unidentified
MPSAVSFLRVEEPIIDLQSDHYFMGEALRQAARAYEAEEVPVGALVVRDGRVIARASNQVELLKDATAHAEMLAITQAEEAVGDWRLNDCTLYVTKEPCPMCAGAIVHVRFARVVFGASDPRGGAAGSAMNLLQFPTLNHRCEITSGVREEECRQLLLTFFAEQRAKNEKERKQAETN

SEQ ID NO: 993 - protein, 177 aa, unidentified
MPDEPIIDLESDHYFMGEALRQAHRAYQAEEVPIGAVVVQNGQIIGRAYNQVELLKDATAHAEMLALTQAEEVLGDWRLNECTLYVTKEPCPMCAGAIVHTRVARVVFGAPDPKAGAAGGVMNLLQYPTFNHRCEITAGVREQECRALLQSFFVEQRAQKKPIPQQLEGNGEGEELS

SEQ ID NO: 994 - protein, 163 aa, unidentified
MLLAMREAEKAREVGEVPCGCVVVKEGRVIARGWNQVETLKDATAHAEMLALTAAEAAVGDWRLEGCTVYVTKEPCPMCAGALVHCRPDRVVFGIPDPKGGACGGWINLLDSNPPLNHKCAVQGGVLGDACLEQFQSFFGAARAAAKERKRREREETRNAAAD

SEQ ID NO: 995 - protein, 192 aa, unidentified
MTMEITENRDTPLDNEELSFSKEDIKYMKAALKQAEKAIAIGEVPIGAVIVHEGKIIARGYNRRNTDKTTLAHAEIACIRKACKKIGDWRLEGCTLYCTLEPCQMCAGAIIQSRIDRVVIGTTSPKSGCGGTLLNILQNPDFNHQAEVLYGVLREECTEILQRFFKDLRRRNKERKKMLRMQTADALSHPDT

SEQ ID NO: 996 - protein, 149 aa, unidentified
MNAEFDEYFMRMALREAEKAAAAGEVPTGCVVVETPSEETAPPSAARILGRAHNQAEGLVDATAHAEMLALSAAFASRGNWRLTGARLYVTKEPCPMCAGAIVLSRVDAVVWGVSDPKRGGGTVFDIFAHPGINHHPAVVAGVLEDPCR

SEQ ID NO: 997 - protein, 158 aa, unidentified
MDQARKYMKAALREAKKAYALDEVPIGCVIVYEGKIIARGYNRRNTDKLTLAHAELMAIKKASKKLGDWRLEGCTMYVTLEPCQMCAGAIVQARMDEVVIGCMNAKAGSAGSVINLLDMKAFNHQVKITQGVMEEECSTMLSDFFRELREKKKKQAVT

SEQ ID NO: 998 - protein, 172 aa, unidentified
MKKVLSREEKYMKEALKQAKKASDMGEVPIGCVVVLDDRIIGRGYNRRTSDHSTLAHAEIIAIRKACRYVKDWRLDDAEIYVTLEPCQMCSGAIIQARIRKLFIGAMNPKAGCAGSLINIFEVPGFNHYVEVTRGILEDECSAILKDFFVRLRQRLKAEKTSLDLKNDSIYN

SEQ ID NO: 999 - protein, 156 aa, unidentified
MEIKHEFFMREALQQAQLAAAADEVPVGALVVRDGEVLGAAHNQRATLADPTAHAEMIAITQAASALGSWRLSGCTLYVTLEPCSMCAGAIVLARLDRVVYGATDPKAGGVESLYRLLEDSRLKHQAEVVRGVLGPECGAILKEFFQRKRRPPAGE

SEQ ID NO: 1000 - protein, 243 aa, unidentified
MELNALSPEQEQALPVPDQNLTFRPSGEDKSLPSAGQDLAVQIPEQDAERQPSAQAPASHTPEQQKLDLKYMKAALKQAEKALAIGEVPIGAVIVYEGRIIGRGYNRRNTDHTTLAHAEITAIRKACKKMGDWRLEGCTLYCTLEPCPMCAGALVQSRIDRVVIGAASPKSGCGGTLLNILQNEDFNHQAEITAGVMQEACTEILQRFFKALRVRNKAEKKARRAAETAMMAKKDAEAASNTL

SEQ ID NO: 1001 - protein, 159 aa, unidentified
MTSHNDDFFMDIALAEAAKAAEAGEVPIGAVAVDPDGNIIARAHNLVEKENSVSRHAEFEVVRQIENMRHDWRMTGITIYVTKEPCPMCAGMLVNSRISRIVYGLPDPAFGGCGGAVDIPGMPGALWHPEVTGNIKSNESKELVQNFFRRRREAKTKNI

SEQ ID NO: 1002 - protein, 169 aa, unidentified
MSNPDFSKTLASLDKEFHERYLQLAYEEAEKSAAEGEVPAGCVIVQLSDDGLVSKIVARAHNMTEGLKDPTAHAEVLAITQAANAVGDWRLTNCILYVTKEPCPMCAGAIVLARLPLVVWGVSDPKRGGQTEFGIFDHPGINHHPEVITGIMEEECLAQLQAFFKARRK

SEQ ID NO: 1003 - protein, 156 aa, unidentified
MDLLFRDDQAFMREALRLATKAAASEEVPIGAVIAKNGRVIGRGYNQVEMLKDPTAHAEILAVTQAAAAVGDWRLNDCDLFVTKEPCPMCAGAAVHARVRRVVFGCEDIRGGAAGSVINLLQMPQLNHRCDINSGVLADECSVLLQDFFRGKRPQK

SEQ ID NO: 1004 - protein, 236 aa, unidentified
MPDDLPPPPACPFSKVFPSQLQRDDTFFMALAYNEAIDAWREDEVPVGAVIECGGEVIAAAHNQRNGSRDPTAHAEILALTQAAQAMGDWRLNEATLFVTKEPCPMCSGAALMSRLKRVVYAVADPKMGCLGGATDLNALPRVNHHLEISGGVLEAECRELLQAYFRLKRIEDQGALLPRRSRIRMRRHDASVILNGVQDPMGRCPGGWRDPAGCFLLRQACARRVAALSMTMPPQ

SEQ ID NO: 1005 - protein, 212 aa, unidentified
MRFEKKIQSHGRREERVPTGVLEIRVHPARSSDTPSGVENEAPIIDLHSDIYFMGQALREARKAYAAQEVPVGAVVVREGRVIARAWNQVETLKDATAHAEMLALTAAQEALGDWRLEKCTLYVTKEPCPMCAGAIVHCRPERVVFGCPDTKAGAAGGWINLLEANPPLNHRCDVTPGVLGEECLYLLQSFFREARERKKTERLGDSAEPLI

SEQ ID NO: 1006 - protein, 164 aa, unidentified
MLDFSSDEYYMKQALRQANFAAEQDEVPIGAVIVHENEIVGRAYNQVETLRDATAHAEILALTQASAKLERWRLSGCTLYVTKEPCPMCAGAAVNSRIDKIVYGLRDDKGGGCGGAFSITDHEGLLHKVDVMPGFMENESLFLIQDFFKRRRSENKDKKNLLDS

SEQ ID NO: 1007 - protein, 185 aa, unidentified
MENPCPFEKIFPSELNRDEAYYMAHAYNQAIEAWKQDEVPIGAVIEHGGQIIASAHNQSRSTTDPTAHAEILAISQAANYLGDWRLNECRLYVTKEPCPMCAGALVIARIGMVFYGLPDPKMGCVGGATNLGALPLSNHHFESVSGVMQEQNHALLKAFFENRRALNASKRLSSGLDDDLSESPV

SEQ ID NO: 1008 - protein, 167 aa, unidentified
MDPIDPSEFEDLLNPLGDDRERFMQMALREAEIALENGDVPVGAVIVKDGKVIGRGHNQRELLKDPTAHAEMIAITQAAAELENWRLTGATLYVTLEPCPMCAGALVNARLKRVVFGTADPRAGACGSVMNVSQADELNHHVEIVHSVLEERCAAILRDFFKSRRKG

SEQ ID NO: 1009 - protein, 146 aa, unidentified
MGEALRQARKAWKAEEVPIGAVIVLNGQIIARASNQVETLKDATAHAEMLALTQAEAVIGDWRLSECELYVTKEPCAMCAGAIVHTRVKRVIFGCLAPKDGAAGSLMNLLQHPKLNHRCELTSGVRQDECVAMLQAFFRERRGEGL

SEQ ID NO: 1010 - protein, 156 aa, unidentified
MDLLFRDDQALMREALRLATKAAASEEVPIGAVIAKNGRIIGRGYNQVEMLKDPTAHAEILAITQAAATVGDWRLNDCDMFVTKEPCPMCAGAAVHARLRRVVFGCEDLRGGAAGGLINLLQMPQLNHRCDINSGVLAEECSELLQEFFRGKRASN

SEQ ID NO: 1011 - protein, 155 aa, unidentified
MIVFDEEYFMRRALFQAENAAAEGEVPVGAVAVKDNTIIASAYNQVEKLQDATAHAEILVITQAAAALEGWRLNDVDIYVTKEPCAMCAGAMVNSRVRKVYYGMHDPRSGCAGSALDITTFPGMLHSVQVQGGILEDECKSIIQEFFKKARKTID

SEQ ID NO: 1012 - protein, 154 aa, unidentified
MDLSNPLADERWMSEALDQAHAALAHDDVPIGAVVVHEGRVIGRGHNERERLEDPTAHAEVTALRAAAAALGSWRVLDSTLYVTLEPCAMCAGAIVLSRIPRVVFGTPDPKAGAAGSVLDVLADERLNHRPIVVGGVRAEECAGLLQAFFASRR

SEQ ID NO: 1013 - protein, 234 aa, unidentified
MAKGPIDIGEENMALNQEDMASNQEPTEPNRQPRDRKAAETEAARLKGQETRRRNYEKRMEKQRLAALAAEEQRLKQRKRDEGFMREALRQAKKAAAIGDVPIGCVIVCGDRIIARGYNRRNADKSVLSHAEIISIKKACKKMGDWRLEDCTMYVTLEPCPMCAGAIVQARIPRIAVGCMNPKAGCAGSVLDMLHVPGFNHQAEVAEGVLEQECSKLMSDFFQKHRPERLPFIL

SEQ ID NO: 1014 - protein, 161 aa, unidentified
MKDFTSDEFYMGEALRMARRAFSSDEVPIGAVVVRNSEIIARAWNQVETLKDATAHAEMLAITQAESAVGDWRLTDCDLFVTKEPCPMCAGAIVHARLRRVVCGCPDPKGGAAGGLLNILQMPQLNHRCEITGEIRTHECAQILKDFFLARRSQTTNMQSP

SEQ ID NO: 1015 - protein, 165 aa, unidentified
MTHPVPELDQLMQPAIDEARAASTPPRRDIPIGAAVYDEEGRLIASAGNRREADEDPTAHAEILALREAARVRGRWNLTGCTLAVTLEPCTMCAGAIVLARIDHLVVGAMDPKAGAAGSLYDLVREERLNHRVRLTTGVREIECAQMLRGFFRDLRERRKGLRAG

SEQ ID NO: 1016 - protein, 154 aa, unidentified
MSDEAFMQQALALAREAEALGEVPVGAVAVHDGRPIGTGFNRREVDRNPLAHAELLALDEARKALGVWRLTGVTLYVTLEPCAMCAGALVQSRVTRLVFGAMDPKAGAVGSLYNLAEEPRHNHRLQVTSGIMADESRLLLKGFFERLREKRRDK

SEQ ID NO: 1017 - protein, 174 aa, unidentified
MSEPHPFDAAMREALSLAAEAAAAGEVPVGAVAVHGGEVVGRGRNRREEDRDPCAHAELLAIREAARTLGRWRLTGVTLVVTLEPCAMCAGALVLARVDRLVYGAPDPKAGAVGSLMDLSSDPRLNHRFPVERGLRADECGEQLRAFFRSRRATSGASGENSGSSALGSGGEIG

SEQ ID NO: 1018 - protein, 150 aa, unidentified
MREALALARDAGARGEVPVGAVAVLEGRVVGRGANAREFGRDPTAHAELLAIRDAARTLGRWRLTGVTLVVTLEPCAMCAGAMVLARIDRLVYAANDPKAGAVGSLLDLSQDPRLNHRFEVVRGVLGDEAGELLRSFFRARRGGGNGSEG

SEQ ID NO: 1019 - protein, 143 aa, unidentified
MTARLTSASALRMAFPLPAPMRRALDLAAEAAAEGEVPVGAVITQGERIVAEARNSMRGLLDPTAHAEMVAIRVAAEALGQARLDGCTLWVTLEPCAMCAAAASIARLDAVRYAAEDPKAGVSSTAPGSSPSPPAIIVPTSSA

SEQ ID NO: 1020 - protein, 159 aa, unidentified
MTAAEDLRWMHQALDLAAEAARAGEVPVGAVAVHDGEAVGRGRNRRETTNDPFAHAEMEALAAAVKALGRWRLTGVTLYVTLEPCSMCVGAMLLGRIDRVVWGASSPKAGALGGLFDLTREAHNQRFEKQGGVAADECGDLLRRFFGDLRAAVEDERGL

SEQ ID NO: 1021 - protein, 177 aa, unidentified
MSTGTNVHPFDAAMQEAIALADEAARAGEVPVGAVAVLDGKVVGRGRNRREEDRDPCAHAELLALRDAARTLGRWRLTGVTLVVTLEPCAMCAGALVLARVDRLVFGALDPKAGAVGSLMDLSADPRLNHRFPVDRGVRGEECAAQLRAFFRLRRASPGGGGENSGSSELGSGGEIG

SEQ ID NO: 1022 - protein, 170 aa, unidentified
MESSYNTNMNDEAYMQIALEEARKAAEAGEVPIGAVVVYEPIDSGTRRSLAEPRIIARAGNRRERAKDPAGHAEFVAMIEASRELDAWRLSDCTVYVTLEPCVMCAGLMYQARVRRCVYGASDPKAGALGTLYQINEDERLNHTFEVTAGVLADECAEELRKFFANKRKK

SEQ ID NO: 1023 - protein, 151 aa, unidentified
MDLPHEHFLDLALEEARRAAGEDEVPVGAVAVFEGAVVGRGRNARERARDPLAHAELDALREASRNLGRWRLSGVTLYVTLEPCAMCAGAMVNARIERLVYGADDPKAGAVRSLYAICTDDRLNHRVEVIGGVRAAESSELLKEFFRGKRK

SEQ ID NO: 1024 - protein, 149 aa, unidentified
MGEALDVARRAASMGEVPIGAVVVRDGAVLATAHNRREIDRDPTAHAELLALRQAAGTLGDWRLDGATVYVTLEPCAMCAGAMVLARIAACVYACPDPKGGFLGTLGDLSQVDGLNHRFGVRAGVRADEASEMLKSFFRGLRGGREGVD

SEQ ID NO: 1025 - protein, 158 aa, unidentified
MATEPDETYMREALELAARAGALGEVPVGAVAVFEGRVIGRGFNRREVDRDPFSHAELLALGEASRALGAWRLSGVTLFVTLEPCAMCAGAMVQARVDRLVFGTRDPKAGAVGSLYNLAEEPRHNHRVAVTEGVLAEESGTILSGFFRSLRERRRTSE

SEQ ID NO: 1026 - protein, 141 aa, unidentified
MDFMSTALELARAAGQMGEVPVGAVAVSGGVIIGRGHNRRETDHDPFAHAELLAMREAAQHLRSWRLTDVTVYVTLEPCAMCAGAMAQARLGAVVFGADDAKQGRADLLVGHNHTVKVTRGVEAEQASVLLKEFFARLRAT

SEQ ID NO: 1027 - protein, 167 aa, unidentified
MSVESPVEGVDTADAADAVWMAHALDEARAAGAAGDVPVGAVVVHEGVIVGRGRNRREVDRDQTAHAELVALREAAREPGHWRVEAALFVTQKPCPMCAGAIVNARVRRLVFGCLNPKAGAVTTLYQIPTDPRLNHHVEVVGGIRSEECAALLRAFFAELRRGPEYR

SEQ ID NO: 1028 - protein, 193 aa, unidentified
MSLAGSRVISMSLERDTETADHAFMGEAIEAARKAGAAGDVPVGAVIVIDDEIIAHGHNRRQVSSDPTAHAEIEALRAASRIVGNWRIEGTLYVTQEPCPMCAGALVNARVKRLVYGCSNPKAGSVHTLYEIVTDVRLNHRMEVTAGVRQEECADLLRQFFADLRRNGRTGSHAGDETGHGTDGDPGDSPGGH

SEQ ID NO: 1029 - protein, 156 aa, unidentified
MTAAETWMREAIALAAAAAGAGEVPIGCVVVHDPTGRIVGRGANRREADHDPTAHAEILAMREAGRTLGHWRLIDCTLVVTLEPCPMCAGAIVNARVPRLIYGCADPKAGAVRTLFQLCNDDRLNHRVDVSAGVLAEQCAEQLKAFVRAQRALGKK

SEQ ID NO: 1030 - protein, 189 aa, unidentified
MTSQEWMHEAINCARQALAADEVPIGCVIVHLPTAQIIGRGFNQRETAHDPTAHAEILAMREAGAALNHWRLLDCALIVTLEPCPMCAGAIVNARIPKLIYGCDDPKAGAVRTLYNLVEDHVRFTGSPRGKKILDNWDHLIARFVKVMPIEYKRVLERRRSTTRPRSLLIGPADRSESGPLHTRGVANG

SEQ ID NO: 1031 - protein, 216 aa, unidentified
AKPAYGVYLYRGFESLPVRNKHSIDFGSVAQWIEHRSTEPGVRGSTPLGSASRRQHMTSPTMTDDQWMHVALSEARAAAATGDVPVGAVIVAADGTLLGRGRNRRELDKDPTAHAEIVALREAAHALGMWRVDATIYVTQEPCPMCAGALVNARIARLVYGCPNPKAGAIASLFSIVSDPRLNHRIDVTSGVLSTECAAVLSQFFAELRRGPTYGT

SEQ ID NO: 1032 - protein, 156 aa, unidentified
MDADDERWMRIALDEADSAAAKGEVPVGCAIVSATGELLASGHNLRETEEDPTAHAEIVAMRIAARKLDTWRLESTTLYVTLEPCVMCAGAMVNARVGRVVYGCLDPKAGAVTTLFTIGADTRLNHRFPVTGGVLADDCAERLRRFFSALRAQGKK

SEQ ID NO: 1033 - protein, 148 aa, unidentified
MRAALAEADAAAAIGEVPVGCVLVGADGAELARGHNLREATQDPTAHAEMIAVRAAAAKIGSFRLEGVTAYVTLEPCPMCAGALVHARVAHVVYGCDDPKGGAVTSLYAVGVDGKMNHTFTLTRGVLADESAARLRTFFAGLRALGKK

SEQ ID NO: 1034 - protein, 164 aa, unidentified
MKKDRVFMAEAMALADRAGELGEIPVGAVIVRKGRVIARAFNRREAWQDPTAHAELIAIRRAAEALGEWRLSECTLFVTLEPCPMCAGTIVNSRVGRVVYGAPDPKAGAVRSVYAMLEDPRLNHRCAVARTMAAECSEQLTAFFVALREGRVARAGRPAGSEEE

SEQ ID NO: 1035 - protein, 239 aa, unidentified
MPSVLEDSGTHDIRDIPQHFIGCRSRRAHQTCPKLVHALPVSLSRFAASICGIRLCFACLVRPCSRYVSPFSLRRFLRGPCYSPAHMATTTDDQHWMQIALEEADAAAATGEVPVGCVLVDFHGREISRGHNGRETLADPTAHAEMIAIREASARVLGWRLDKVTAYVTLEPCAMCAGALVHARVARVVYACADPKGGAVDTMFGIGRDARLNHRFDVTAGVLGEESAMRLRRFFAGLR

SEQ ID NO: 1036 - protein, 156 aa, unidentified
MDVTQDVAFMLEALAEADRAAEIGEVPVGAVMVVGNAIVARGHNLRESAADPTAHAEMIAIRECAKTRGDWRLDDATLYVTLEPCPMCAGALVHARVKRVVYGCDDPKAGAVKTLFSIGNDPRLNHRFELTSGVRAEECASKLQAFFQRLRAQGKK

SEQ ID NO: 1037 - protein, 174 aa, unidentified
MSTAASFPLPAESAEPPATPALTVAPEHVAYMRQALEAAEAATQRGEVPVGAVVVAGGAVIAVAHNERETGNDPTAHAEVLALRRAAAALGSWRLTEADLYVTMEPCPMCAGAIVNARVRRVYYGCDDPKAGAVRSLYRILDDRRLNHRVEVVPGVLSVEAAGLLRAFFGRLRR

SEQ ID NO: 1038 - protein, 178 aa, unidentified
MTTAAAAEPLSSSTLAEGGSSVGERELSFMRRALAAAELAGGRGEVPVGAVVVVGDEVVAIAHNERETGGDPTAHAEILALRRAAAALGRWRLTDADLYVTMEPCPMCAQAISFARLRRLYFGCDDPKAGAVRTLYSLVEDSRLNHRVEVFPNVLAAEGAALLRGFFSRLRQPEARER

SEQ ID NO: 1039 - protein, 143 aa, unidentified
EALHEAELAAELGEVPVGCVLVRAGEVIARGRNLREAARDPSAHAELVALRSAAARLGSWRLVDVTCYATLEPCPMCAGALVNARIARLVYGCDDPKAGAVRTLYSIGQDPRLNHRFEVSAGVLAEACAERLSSFFAELRSRR

SEQ ID NO: 1040 - protein, 168 aa, unidentified
MSVTRTAELPLDATPEAVAVDELHMRTALAAAERATLSGEVPVGAVVVLRGEVIAVAHNQRETNNDPTAHAEIVALRAAAAALNSWRLVDADLYVTMEPCPMCAGAIVNARVRRVIYGCDDPKAGAVRTLFQLLDDQRLNHRVEVVSGVLAAESSALLKSFFSRLRLR

SEQ ID NO: 1041 - protein, 159 aa, unidentified
MQPTDPFHLQHMELALEEAGLAFAQDEVPIGAVIVHLEKGIIARAHNQREMLQDPTAHAEMIAISHAAGALGSWRLEDTILYVTLEPCPMCAGAIVQARVPFVVYGANDAKAGACHTLYEITNDPRLNHRCHVLGGVLSERCAAILGEFFAAKRRLGKK

SEQ ID NO: 1042 - protein, 171 aa, unidentified
MIDPFSPFDLTFTDPHHPFHLHHMELALEEAAAADREDEVPVGCVIISPERGIIASAHNQREQLTDPTAHAEMIAITQAAASLKSWRLEQCILYVTLEPCPMCAGAIVQARIPVVAFGCTDPKAGACTTLYQIASDPRLNHRARIIGGIQAARCAAMLSNFFQRKRAMGKK

SEQ ID NO: 1043 - protein, 149 aa, unidentified
MLLALDQARIALAHDEVPIGAVLYHLPTRNIIGQAHNRRILDADPPAHAELLAIRQGAQTLGDWRLTDTILAVTLEPCPMCAGAIVNARIPQLVYGCADPKAGAVQTLYQLCSDPRLNHRVQLTAGVRSDDCSALLTSFFAAKRAMGKK

SEQ ID NO: 1044 - protein, 165 aa, unidentified
MNGPRAHEIDDRMMGAALDAARAALSIGEVPIGAVVYRGEDVLGTGHNRRETDADPSAHAEVLAIRAAAHAIGDWRLEGCSIAVTLEPCPMCAGLIVNARLERLVYAAADPKAGAVETLYGLCADARLNHRASEIRAGVREAEAAGLLRGFFRDLRARGDGPPDA

SEQ ID NO: 1045 - protein, 147 aa, unidentified
MMRRALDLAAAAAEEGEVPVGAVIYDTQTGETLGEAANRREADRDPSAHAEFTAIRRACSKINDFRLNRCSLAVTLEPCPMCAGLIVNARVGRVVYGADDPKAGAVRSLYEILSDARLNHRCEVIPGVLADESADLLRSFFRGLRAR

SEQ ID NO: 1046 - protein, 175 aa, unidentified
MHQVRLQTERHPDVTDVDIEMMQRAIKLAKKAATLGEVPVGAIVYKGSKVLAEGYNVRESASDPTGHAELIAISKAGKALGDWRLTDCSLAVTLEPCPMCAGALVNARLGRLIYGAADPKAGACHTLYEIPIDDRLNHRVAMIGGVMANECRALLRDFFQQRRQINRDTRNARSA

SEQ ID NO: 1047 - protein, 167 aa, unidentified
MRQPEPPQPTTTDIEMMERAIELAQQSADAGEVPVGAIVYNTQTGEIVAQAHNTRDMHNNPAGHAEFSAIQSACNSIGDWRLNDCTLVVTLEPCPMCAGLIVNARVGRLIYGASDPKAGAVRSLFELCDDTRLNHRCEIHTGVLGDRCSDQLRTFFRDLRAQRKSNG

SEQ ID NO: 1048 - protein, 180 aa, unidentified
MVGWLSRVLGMRRGAAAPGAPASATSTDVNMMGRALELARQAAAIGEVPVGAVVYETGSGRILGEGFNRREIDHDPAAHAELTAIRAAAAARGDWRLNDCTLVVTLEPCAMCSGLIVNARIGRLVYGAADAKAGATESLYRLTSDPRLNHRVEPVAGVMAEECGALLKEFFRGLRAGGRR

SEQ ID NO: 1049 - protein, 175 aa, unidentified
MQQLKLVQSDSVRATEVDVDMMKRAIELANLAAAMEEVPVGAVVYRGNKIIAEAHNNREQNADPTGHAELLAIRLASEKLDSWRLNDCALAVTLEPCPMCAGAIVNSRISRVVYGATDPKAGACESLYEILSDDRLNHQVEMVSGVLASECSKLLKDFFKERRKINRERRLRNAS

SEQ ID NO: 1050 - protein, 172 aa, unidentified
MLARLKNLFTKPKQANDATEIDDRMMVRALELARDAAGAGEVPVGAVVYVNETGEIIGEGANRRETDNDPSAHAEHIAIVRAAERLGDWRLNHCTVVVTLEPCAMCAGLIVNARLGRVVYGADDPKAGACRSLFEIADDPRLNHRAQIIAGVRHDECAQVLRTFFRGLRAKG

SEQ ID NO: 1051 - protein, 168 aa, unidentified
MADAVDEFDLTMMRRALAQAERAAAMHEVPVGAVVYELSSRAVLAEAHNRREIDADPTAHAEMLALRAAARRRGLWRLDGCAIAVTLEPCPMCAGALVNSRIDRLVYGAADPKMGCVETLYGLCTDERFNHRLEVRGGVLAEPCAAVLSEFFKARRGADKAPKPKPGT

SEQ ID NO: 1052 - protein, 162 aa, unidentified
MTAGAPTDLDRAMMRRALDRARDAMAMDETPVGAVVYETATGRILAEAHNRREADDDPTAHAELIAIRHAARAVGDWRLNDCTLVVTLEPCAMCAGAIVNARVGRLVYGASDPKAGAVESLYRLCQDARLNHRIEPIGGVDAEECGGLLREFFRAKRSRTDD

SEQ ID NO: 1053 - protein, 152 aa, unidentified
MMARAIELAQHAASIGEVPVGAVVYCNTEVLGEGYNRRESDRDPTAHAEMLALRQAAEQRGSWRLEDCSLAVTLEPCPMCAGAIVNARIARLVYGAADPKMGCVQTLHQLCSEQRFNHRVQLIACIEAERCGQLLKEFFQARRNGGNKGKPS

SEQ ID NO: 1054 - protein, 172 aa, unidentified
MDLTDLDTRMMRLALEQARAASDAGEVPVGAVVYRGEEVLAKAHNMREAWADPTAHAELIALREAAKTIGTWRLDGCRLAVTLEPCPMCAGALVNSRLEAVVYGITDPNMGCVESLHRLLDTRAFNHRVSWQGGVLADASLALLQGFFKARRGKDKPPKPTSQTGQADATRP

SEQ ID NO: 1055 - protein, 161 aa, unidentified
MTADPAKVCARDEQAMSRAIELAREAEAMGEVPVGAVVYRTETGETLGEGYNRRETDDDPTAHAEILAIRQAATKIGDWRLNECTLVVTLEPCVMCAGAIVNARVGRLVYGAIDPKAGGVESLYAIPSDNRLNHRPTILPGLMAEACGELLRAFFRSRRGK

SEQ ID NO: 1056 - protein, 180 aa, unidentified
MIRFRSDITRRNERIRARQRSWSATNHAMMGLALDLAGQAAAIGEVPVGAVVVHRGRVVGEGFNRRESEADPTSHAEIEAIREAATALGDWRLSECTLYVTLEPCPMCAGAIVNARVGRLVYGATDPKAGAVASLYQLCSDARLNHRVEVLGGVRARECGLVLRRFFRGLRRRRRASRRR

SEQ ID NO: 1057 - protein, 168 aa, unidentified
MMAPPEQPAAPLPPTEATETDLAMMRRALDLARSAGEAGESPVGAVVYETATGRILAEAHNTREADKDPCGHAELIAARAAAKALGDWRLNGCTLVVTLEPCAMCAGMIVNARFGRVVYGASDPKAGAAESLYALTQDARLNHRVRPVAGVLAGESAQMLREFFRQRR

SEQ ID NO: 1058 - protein, 166 aa, unidentified
MLTSDQEYMNLALELGLQAAREGDIPVGALVVDPCGEIIGRGRNRRRIEHDPTAHAEVVALREAARNLGVWNLNGCSLYVTLEPCPMCAGALVQARVSRLVYGCTDPKAGACGTLYDLTRDTRLFHRLQVVPGVMEQECRALLQDFFRECREKNRTFGRLLDGRNN

SEQ ID NO: 1059 - protein, 158 aa, unidentified
MTDDERFMGYALARAEAAAARGDVPVGAVVVRDGAVVGVGENRREIEADPTGHAEIVALRDACRSAGRWRIDGATLYVTLEPCPMCAGAIVNARVARLVYGADDPKAGAVRSLYEICTDPRLNHRVELCPGVLAEPAAGLLRDFFRRARARAKLGQGV

SEQ ID NO: 1060 - protein, 166 aa, synthetic construct
MGDSDPTAADLSFMDAALDLARRAADAGDVPVGALVVLDGRIVGIGGNRREVDADPSGHAEIVALRDAGKSVGRWRVDGATLYVTLEPCPMCAGAIVSARVARLVYGADDAKAGAVRTLYQICSDPRLNHRVEVVAGVRAEESRALLRDFFAQARQRRRPRPGGAR

SEQ ID NO: 1061 - protein, 177 aa, unidentified
MAADLEYMRLALELAAEAGERGDVPVGALVVREGRILGTGFNTREREHDPTGHAEVVAMREACRQARRWRLDGATLYVTLEPCPMCAGALINTRIARLVYGAHDPKAGAVRSLYQLCEDPRLNHRIEVVGGILAEDGAAQLKQFFRAARARARRERAAGNEAPRWERGEQERRGDQE

SEQ ID NO: 1062 - protein, 156 aa, unidentified
MSHSDELFMEEALREAQRASALGEVPVGAVVVRDGHIVGRGCNRPVTAHDPTAHAEIQALREAGHVVGNYRLNDCDLYVTVEPCAMCAGAITHARIRRLIYGAEDPKAGAVHSMLQVLNHPKLNHQVEVTCGVLAARCMDLLQTFFRTKRTTAENH

SEQ ID NO: 1063 - protein, 169 aa, unidentified
MLIASHCISLFAMSLSDEFWMEEALREAQRALALGEVPVGAVVVSDGRIVGRGCNRPLSANDPTAHAEILALREAGTTIGNYRLLDCDLYVTVEPCPMCAGAITHARVRRLVYGAEDAKAGAVRSMLQVLNHPQLNHKVEVTSGVLAARCMQLVQSFFRERRAEPDNNR

SEQ ID NO: 1064 - protein, 155 aa, unidentified
MEPTDELWMAEAIREAHLAQAGGEVPVGAIIVCGGRIAGRGGNRNIRDSDPTAHAEIIALREAGHHMGNHRLPDCVMYVTIEPCAMCAGALMHARLARLVYGADDPKAGGVHSVTGVLNHPRLNHHMQVTSGVLAARSSDLLQAFFREKRVKTAE

SEQ ID NO: 1065 - protein, 142 aa, unidentified
MEEALREAGRALHAGEVPVGTVIVHENKIVGRGFNRSISDADPTAHAEVIALREAGKNLGNYRLRGCELFATIEPCAMCAGAMVHARIKRLIYGADDPKAGAVKSVMQVINHADLNHRMEVVGGVLAGRSSQLLQEFFRSRR

SEQ ID NO: 1066 - protein, 155 aa, unidentified
MADPVTEQSDELWMEEAIRCAQRALEIGEVPVGAVVVCDGRVVGRGWNRNLADNDPTAHAEIVALRDAGATIGNHRLVDCELFATIEPCTMCAGALVHARIRRLVYGAYDLKAGAVRSVLQVLNHPQLNHRMDVRGGVLAGRSAEILQEFFKKRR

SEQ ID NO: 1067 - protein, 174 aa, unidentified
MSGSKPRARPPARQSSQAVPESHPQNPPDELWMEEALRCAQRALEANEVPVGAVVVHDGQIVGRGWNRNITDSDPTAHAEIIALREAGATVGNYRLEHSELFVTIEPCAMCAGALTHARVRRLVYGSDDPKAGAVRSVMPTLNHPQLNHKVEVRGGVLAGRSAELLQSFFRSRR

SEQ ID NO: 1068 - protein, 157 aa, unidentified
MMSPDEQWMEVALQQAAEAARLGEVPIGAVVVCDGAIVGRGANRNLNDADPTAHAEVVALREAARTLGTQRLVACEMFVTIEPCAMCAGALTHARIRRLVYGADDPKAGAVHSVMTVLNHPQLNHKMEVLGGVLQERCGELVRDFFRSKRAESKIKS

SEQ ID NO: 1069 - protein, 142 aa, unidentified
MEEALRCAQRALESGEVPVGAVVVHAGRIIGRGWNRNIGEFDPTAHAEIAALREAGATLGNHRLGDCDLFVTIEPCAMCAGAMTHARIRRLVYGAEDPKAGAVRSVMQVLNHKHSNHRIEVRSGVLAGRSAELLQTFFRNRR

SEQ ID NO: 1070 - protein, 172 aa, unidentified
MTASTESLCLPDRRREEHYMRLALDQARQAEKADEIPVGAVVVIGGRVIGRGFNSPIGRNDPTAHAEILALRESALTVDNYRLEEATVFSTLEPCVMCAGALVAARVRRLVFAARDIRFGAVRSKFRLADSELLNHRVQVEEGLLAAECGDLVRAFLQRARERPLPGLDGSA

SEQ ID NO: 1071 - protein, 150 aa, unidentified
MRQALAAAHEAGERGEVPVGACIVAGDVILAVAGNRTRTDSDPTAHAEIVALRNAAKSGNYRLTDARVYSTIEPCVMCAGALIQARVSRLVYGARDERAGAVESHFRVCDTDFLNHRIAVTAGVLEAECRELMQRFFRARRGNQGMRAEG

SEQ ID NO: 1072 - protein, 165 aa, unidentified
MKAAEERENAAQWMRQAVAAAHGARERGEVPVGACIVDGETILAVAGNRTITDQDPSAHAEIVALREAARKIANYRLTNAVVYSTIEPCVMCAGALIQARVKRLVYGARDERAGAIESRFSVCNTDFLNHRIEVTAGVLENECREIMQEFFRARRCGTAGAKLEG

SEQ ID NO: 1073 - protein, 252 aa, unidentified
MALLTGRLPPAVLSGCWICLRRVDCCLFDFLRWSLDVKSVWSASARLGRGTPEIDNNTRHAPALNYVGFSCLTCLDERPIVAVRLFEGTTVVVNTAAEIELDERWMRHALAAAGEARERGEVPIGTCIVSDDKLIAVAGNRTRTDCDPTAHAEIVALREAAQTLGNYRLTAVDVYSTIEPCAMCAGALIQARVRRLIYGAADERAGAVVSRFRICDTDFLNHRIEVRSGVLEPECRALMQEFFKTRRGRIVD

SEQ ID NO: 1074 - protein, 124 aa, unidentified
MIAAACNRTITNNDPTAHAEILALRAAAETIGNYRLTGVTVYSTIEPCAMCAGALVNARVGRLVYGADDERFGAVKTNFGIGVTNVLNHQIKIEGGVMADECRQVMQEFFRNKRRKLDNEGASN

SEQ ID NO: 1075 - protein, 148 aa, unidentified
MSGDVFMREALALACQAEANGEVPVGAVVVIGGEVRGRGSNAPIRLNDPTAHAEMLAIREAAAAIGNYRLEGAILYSTLEPCVMCAGALVAARVGRLVFGARDLRFGGGRSKFRLADSELLNHRLEIVEGVLAADCLALVKRFFEQRR

SEQ ID NO: 1076 - protein, 127 aa, unidentified
PIGAVIVDANDKLLASASNRTITNVDPTAHAEILVLRTAALQVGNYRLSGTTVYSTIEPCAMCAGALVNARVARLVYGAADERFGAVETHFGICDSSALNHRLEISSGIHADECRRLMQEFFRSRRV

SEQ ID NO: 1077 - protein, 110 aa, unidentified
MREALKCASEAAELGEVPIGACLVDESGVMIASASNRTIIDSDPTAHAEILVLRQAATSIGNYRLTGMTLYTTIEPCVMCAGALVNARIKRLVFGARDERFGAVETRFRL

SEQ ID NO: 1078 - protein, 153 aa, unidentified
MITTDIDEKWMRAAIEAARSAADLGEVPVGACLVDAGGNLLSIASNRPITNHDPSAHAEMLALREAAAKVENYRLTGVTAYSTIEPCVMCAGALVNARVARLVFGSHDERFGAVESKFRICDSELLNHRIEIVPGVLADECRALIQEFFRARR

SEQ ID NO: 1079 - protein, 164 aa, unidentified
MNELDEIWMREAIRAARAAETLGEVPIGACLIDAEGALLAVAGNRTITATDPTAHAEILVLREASALIHNYRLVDTTIYTTIEPCTMCAGALVNARIRRLVYGAADERFGAVRTLFNLCDNQALNHRIEIVAGVLEAECRALVQNFFRKKRDFQKSQKINADQT

SEQ ID NO: 1080 - protein, 142 aa, unidentified
MWRTLHLAREAEKLGEVPIGAIIIDGKGKILAATSNRTITDSDPTAHAELMAIRTAGMRIGNYRLNGTTMYSTIEPCVMCAGAIVNARVERLVFGAHDERFGAVETLFKIGSGRKLPPSAAGFLSRPPRPLRPLTQDPEARA

SEQ ID NO: 1081 - protein, 158 aa, unidentified
MSNYSGSAAAGDEAWMRRALGLARRAAEEGESPVGAVIVGADGRLLAEAHNAPIGMHDPTAHAEIVALRAAARALGNYRLNGTTMYVTLEPCVMCAGALVHARVKRLVFGARDLRFGGVRSKFRLADSDLLNHRLEIEEGPMAAEATALLEEFFRARR

SEQ ID NO: 1082 - protein, 167 aa, unidentified
MSFNVLTQHHFSSDDEKWMRLALEQASFAEMQGEIPVGAVIVSQNQVIGVGYNAPITSQDPTAHAEIVALRDACARIQNYRLPDDAVLYVTLEPCTMCVGALIHARIHKVIFATYEPKAGSLLSARQLLKNNGYYNHVFEYQDGCLQQEASALLSTFFKKRRAEKKQ

SEQ ID NO: 1083 - protein, 178 aa, unidentified
MAVLTNPMTGADETDDYWMNRALALAAQAAESGEVPVGAVIVMDGREVGAGFNGPIGQCDPTAHAEIRAIRDAGARAGNYRLPGATLYVTLEPCTMCVGAIVHARISRLVFGTLEPKAGAVESVRQTLQDDHFNWQVAVTGGVMASQCKDIIQRFFADRREKHRLRKQKSSGKEQQPL

SEQ ID NO: 1084 - protein, 157 aa, unidentified
MIRSDEFYMHRALDQAHLAFVEGEVPVGAVVVDAQGTIIGAGRNSPVASCDPSGHAEIRALREAGQQLGNYRLEGCTLFVTLEPCMMCAGAMVHARLARLVYGAAEPRTGMVESKANLLAQPWFNHQVAVTRGVLAAPAKKLLKQFFATKRESITQR

SEQ ID NO: 1085 - protein, 167 aa, unidentified
MSELPKNDEYWMARALVLAERAASIGEVPVGAIVVRHGQELGVGYNAPITGCDPTAHAEIRALRDASARAGNYRLTGATLYVTLEPCTMCVGAIVHSRISRLVYGAREPKAGAVESARCTLDEAHLNWQVDAEGGVLEGECGQIISDFFSRRRAEIRRRRKQNSGKE

SEQ ID NO: 1086 - protein, 166 aa, unidentified
MGKVQIIDRSQDARFMRLALELAARGAALGEVPVGAVLVRDGEVVGEGFNCPISAHDPSAHAEMVAIRAAAKAAGNYRLPGSTLYVTLEPCSMCAGLIVHARISRVVYATSEPKAGVVISRGRFFEQDFLNHRVLAEGGVLAQESAELLSGFFQARRRGASQPVSG

SEQ ID NO: 1087 - protein, 167 aa, unidentified
MSEVTAEDEYWMNRALQLAGEAAAKGEVPVGAVVVLDGGEIGAGFNAPISGCDPTAHAEIRALRDAAARVGNDRLPHATLYVALEPCTMCVGAIVHGRISRLVYGASEPKAGAIESARRTLEEPHLNWGVTAVGGVLSDQCSQVISEFFSRRRAEIRRLRKQNSGKE

SEQ ID NO: 1088 - protein, 161 aa, unidentified
MDDVTAMRRALAQARLAFDAGEVPVGAVVVQGDEVVAEGFNQPIGRLDPSAHAEMVAIRAAATAIGNYRLTGTTLYVTVEPCTMCAGLLVHSRIQRLVFGAPEPKSGAVVSNLCLFDHGPYNHRPDVTGGVLESECSELMSRFFTERRERRKALRRAGRPE

SEQ ID NO: 1089 - protein, 173 aa, unidentified
MISDDAGELDDIAAMRLALEQARLAAGEGEVPGGAGVVLEGKVIGTGYNGPIGGLDPSAHAEMRAIRQACLTVGNYRLPGATLYVTVEPCTMCAGLLVHSRISRLVYGAAEPKSGAVVSNLKLLDNGPYNHRIEVAGGVLADECSALMSEFFARRRARKKALKQSTGPAKPAS

SEQ ID NO: 1090 - protein, 179 aa, unidentified
METTSVMTPDVDDERWMRAALALAERAAALGEVPVGAVVVRDGEVIGEGWNQPISGQDPTAHADIMALRDAARRVGNYRLVDADLYVTIEPCTMCAGAIVHARIRRVVFGASEPKAGALISRQSLLDEPWLNHRVSWTGGVLAEHCSERISAFFRARREERRRQRQLQSPSSEGGSGLG

SEQ ID NO: 1091 - protein, 174 aa, unidentified
CRVSHQLLLSGNNPLTLASENDSAWMAQALQLSARAAELGEVPVGALVVLNGEIIGQGYNQPIASHDPTAHAEIMALRDAAQRVGNYRLPEAELYVTLEPCMMCSGAIVHARIARVIYGATEPKAGAVDSQLNSFSLAHINHRPLVTSGVLADTCSQQLSDFFKARRAAKRAQS

SEQ ID NO: 1092 - protein, 158 aa, unidentified
MQEALLEAAKAEALSEIPVGAVVVLEGEIIGRGYNCPISSVDPTAHAEIQALRDAASRVGNYRLPGATLYVTLEPCSMCAGAIVHSRVERVVFAATEPKSGVVESQGRFFDAPFLNHKVQCCGGVLQEAASQQISQFFQYRREQKKRLKRLSSPSREE

SEQ ID NO: 1093 - protein, 164 aa, unidentified
MPAVTGIAVSPMSEARWMEEALALAEQAAALGEVPVGAVIVRGGGVIGRGFNRPISSSDPTAHAEIEAIRDAARTVGNYRLPESEMYVTIEPCTMCTGALVHARIARLIYGAPEPRAGAVCSQSRLLDAGHFNHRVSYEGGLLEARCAALLQRFFQARRAARQP

SEQ ID NO: 1094 - protein, 155 aa, unidentified
MPHSDEHWMRQALARARQGAATGEVPVGAVIVLNDTVIGEGWNQPITSADPTAHAEIVALRSAAQQQHNYRLPDATIYVTIEPCTMCAGALIHSRIKRLVFGTPEPRAGAVCSHFRLLDTEGIYNHRVAWEQGVLAEDCAQLISSFFQARRKPVE

SEQ ID NO: 1095 - protein, 162 aa, unidentified
MSPASSAIEEQEQHESWMRLALEQAQLAAAADEVPVGAVLVRDRVLVAAGHNQPIGACDPTAHAEIVTLRKAAQAAENYRLPGSVLYVTIEPCTLCLGAIIHARVDTLVFAAREPRAGAVVSRQRLGEQQYFNHQPAVIEGVLAIDSAALMQAFFAGRRSGQ

SEQ ID NO: 1096 - protein, 155 aa, unidentified
MQQHSTDQHWMRLALELADRAAAEGEVPVGAVLVRAGELLGSGYNRVIGACDPSAHAEINALRAAALAESNYRLAGATLYVTLEPCTMCVGALVHARVARLVFAAREPKAGMVCSNAALLDQPHYNHRVQWQEGVLAAESAARLQAFFRARRQSG

SEQ ID NO: 1097 - protein, 153 aa, unidentified
MDTTSHAHWMALALERAREAARQDEVPVGALLVRGGEALGEGSNRPVSSHDPTAHAEIIALREAARREGNYRLPGSVLYVTIEPCTMCVGAIIHARIDLLVFGAREPRYGAVVSARRLLDSDRYNHHPAVLEGVLADECGDLMRGFFRARRNR

SEQ ID NO: 1098 - protein, 167 aa, unidentified
MPDISDDRHWMSRALQLAQQAAAAGEVPVGAIVVLDGQEVGAGFNAPISACDPTAHAEIRALRDAAARVGNYRLSGATLYVTLEPCTMCVGAIVHGRISRLVYGATEPKAGAVESARRTLDEPHLNWAVEATGGVLEQQCSEIISEFFSRRRAEIRRQRQSSSPGKE

SEQ ID NO: 1099 - RNA, 269 nt, synthetic construct
  source 1..269: mol_type = other RNA
nnnnnnnnnnnnnnnnnnnngtaactgtccataaataacttagtcaactaagttattttaaagttacccgcctaagttcttcgagaactacgttagggatgaaaacataggtactctcgcgatgcttctccagtccgagactctacggggaactattaaacaggtccgatggaaaggccagtgtagtttccattcaaaaccgtcctataacattggctaggagactattacccgcgtcagcggagctaggtaacaatttatgcaaagag

SEQ ID NO: 1100 - RNA, 233 nt, synthetic construct
  source 1..233: mol_type = other RNA
nnnnnnnnnnnnnnnnnnnnggctattgaagatttgaagtgggaaacccgcaaaaagtctaatagccacagccacagcgacgtatgtaagttttctctcaggtagaggcgacggatgcacctgcgggttttcccagctcgcagcaactgccaagcatacgccaaggcaagggaaacactaccaccccattggggtgtgccttaacggaaaaaactatgaaaggagataacgtt

SEQ ID NO: 1101 - RNA, 277 nt, synthetic construct
  source 1..277: mol_type = other RNA
nnnnnnnnnnnnnnnnnnnngtcaggaacctcggccttaaggcacgaggcttgcaggagaaatccggtaagccattctgaccagcctcagtcttaactggctacatttcgagagtcacgacacccttagatgcgtgctagtcttccgctctgtcgttaacaattaaacagttctaaggtcactggaacggtgttgttaacctaacaagctctcgaaatattggcgaagcaaacattaccccgcaagggaggatttcatgcaaaattacacatttgta

SEQ ID NO: 1102 - RNA, 276 nt, synthetic construct
  source 1..276: mol_type = other RNA
nnnnnnnnnnnnnnnnnnnngtaaactacccgacactaagctgagtacagctataatgggggcttttaaagaagcctagagtttacccgactaagtacctcgcgtactacgttttggaagccatcacacctacggatacgaagccagtctgtagctctgtggttaacgattaaacaggtatatcgggtcgaaaccagtgtcgttagcgcgacaaacttctaaaacattgtcaaggctaccattacccgtaaggagactcactcgtgagtaaagttt

SEQ ID NO: 1103 - RNA, 286 nt, synthetic construct
  source 1..286: mol_type = other RNA
nnnnnnnnnnnnnnnnnnnngtcaacgacccaacactaattaaaatatagtgtgggcttgtaatcagtattgcaagtcttgagttgaccagactaagtgaagaactacgttattactaagagttaaagacctacctacggatgcttgcaagtctgtagcactagaactgaacagttaaatattctatttgggtattgaaagtgctgttcggatagttaccgggtaataacattgtcgatgcaaacattactgaataaaggagggacgcaacaatgtccaaaaccaa

SEQ ID NO: 1104 - RNA, 276 nt, synthetic construct
  source 1..276: mol_type = other RNA
nnnnnnnnnnnnnnnnnnnngtaaactacccgtcaccaagctgagtacagctatggtgggggctttttaaaaagcctagagtttacccgactaagtacctcgtgtactacgttttggaagccatcacacctacagatacgaagccagtctgtagcactgtggttaacgattaaacaggcatatcgggttgaagccagtgtcgttagcgcgacaaacttctaaaacattgtcaaggctaccattacccgcaaggagactcacaagttgagtaaagtt

SEQ ID NO: 1105 - RNA, 291 nt, synthetic construct
  source 1..291: mol_type = other RNA
nnnnnnnnnnnnnnnnnnnngtcatgaaccccatgcctaaaggcaggggcttgtagactgcccgactcttcgagcgggatacaagccagaacatgaccagcctaaaaccttcgaggtctacgtttttaaggtcaagatacctacaaatgcgtcgctagtttgtagccctatcgttggttgttaaacatctgtaatgggttaaggaagtgcagtcaacatgacaagccttgaaaacattggcgaagcgaacattacgagcaatcagaggagacgcaacaatgtctaactttg

SEQ ID NO: 1106-1111 - skipped (6 entries)

SEQ ID NO: 1112 - DNA, 1869 bp, synthetic construct
  source 1..1869: mol_type = other DNA
atgcagcgcgttttcgtgctggaccacaacaagcagccactgatgccctgtcatccagcgcgcgcccgtaagttacttaagaaaggcaaagccgcggtgtatcgtcgttatccgtttgccatcatcatgactcatcgtgtcggcggagacctgcagactgttgagatcaagttcgccccgggcagtcgtaccacaggtattgcgctggtcggcgacttcgatcgcggtaaagaggtgatttgggccgggaatctgaatcaccgcggccaccaaattaagtcgaacctgaattcccgccgcgcgattcgtcgtgctcgtcgcaaccgcaaaacccgctaccgccaagctcgcttcaacaatcgtcgccgtccgaagggatggttaccgccgtctctgcgtagccgtgtagacaacacgaagaactggatgcacaaattggcgcgtctggcgccgcttacccagattgccgtggagaccgtgcgcttcgacacccaaaagctccagaagcctgagatctcaggcgtcgagtaccagcagggcgaactggctggatacgaattgcgcgagtatctcctggagaagtggggacgcgagtgcgcatactgcggcgctaagaacatccctctggagatcgagcatattcaggcccgcagtaagggcggctcagaccgtgtgagtaatctgacgctggcctgtacaccgtgcaacattgacaaaggaaacaaagacatcaaggaattcctgagcctgaaaccaaagcgcctgaagaagattcaggcaaccgccaccgccccgctgaaggacgccgccgcggttaacgcgacacgttatgcaaccggtaacgtactgaagtgctttagcttgccaatcacgtttagctcgggcggccgtacgaagttcaatcgcgttaaacttggttatctgaaggatcactggatcgatgccgcgtgcgttggagagtctggcagccaggtggtcatcccaaaggcaattaccccgctgatcattaccagcaaaggccgcggctctcgccaaaagtgccgcatgaaccagtatggattcccccgcacgggtccaaagaagcagaaacaagtgaaaggattccagacaggtgacatcgttaaggcgattgttaccaagggcaagaaaattggtacctacatcggccgcgtcgtagttcgttcacgcgggagtttcgacatcgggtctggagagaagaaggtcggatcaatcagctacaagtactgtcagctgttgcagcgcgccgacggatatgaatatacgtcggggagtgaaacacccggcacatccgaagcttcgacacctgaatctgcctccgaggttgaatttagtcatgaatattggatgcgccacgcgctgacgttagccaaacgtgctcgtgatgagcgcgaagttccagtcggggccgtcttggtccttaacaatcgtgtcattggcgaggggtggaaccgcgctattgggctgcacgatccaacagcgcatgctgagattatggccttgcgtcaaggagggttagtaatgcaaaactaccgtcttattgatgctacgttatactctacattcgaaccctgtgtaatgtgtgcaggagcgatgatccacagtcgtattggccgcgtagtatttggtgtacgcaatgctaaaactggagccgccggatcgttgatggatgtcttgcattaccctggaatgaaccatcgtgtagagatcactgaaggcatccttgccgatgagtgtgcggctttgctttgctatttcttccgtatgccacgtcgtgtttttaacgcccaaaaaaaggctcaatccagtaccgatgggtcaggcctttctcccaagaagaagaggaaagtc

SEQ ID NO: 1113 - protein, 623 aa, synthetic construct
MQRVFVLDHNKQPLMPCHPARARKLLKKGKAAVYRRYPFAIIMTHRVGGDLQTVEIKFAPGSRTTGIALVGDFDRGKEVIWAGNLNHRGHQIKSNLNSRRAIRRARRNRKTRYRQARFNNRRRPKGWLPPSLRSRVDNTKNWMHKLARLAPLTQIAVETVRFDTQKLQKPEISGVEYQQGELAGYELREYLLEKWGRECAYCGAKNIPLEIEHIQARSKGGSDRVSNLTLACTPCNIDKGNKDIKEFLSLKPKRLKKIQATATAPLKDAAAVNATRYATGNVLKCFSLPITFSSGGRTKFNRVKLGYLKDHWIDAACVGESGSQVVIPKAITPLIITSKGRGSRQKCRMNQYGFPRTGPKKQKQVKGFQTGDIVKAIVTKGKKIGTYIGRVVVRSRGSFDIGSGEKKVGSISYKYCQLLQRADGYEYTSGSETPGTSEASTPESASEVEFSHEYWMRHALTLAKRARDEREVPVGAVLVLNNRVIGEGWNRAIGLHDPTAHAEIMALRQGGLVMQNYRLIDATLYSTFEPCVMCAGAMIHSRIGRVVFGVRNAKTGAAGSLMDVLHYPGMNHRVEITEGILADECAALLCYFFRMPRRVFNAQKKAQSSTDGSGLSPKKKRKV

SEQ ID NO: 1114 - DNA, 9265 bp, synthetic construct
  source 1..9265: mol_type = other DNA
gccgccaccatgggtaaaagaacagccgacgggtctgaattcgaacccaagaaaaagaggaaggtcggtaccgaagcctctccagcaagcagaccccgaccactcatgggccctcgcacgttcactgaaaacttcactaataatccggaagtgtttggtagacatcagacatacctttgctacgaagtgaaatgccaggggccagatggaactagagatttgatgacagaacagcgggactttctctgcaaccaagctaggaacctcttgagcggcttcgacgggcgccatgctgagcggtgttttctcgatagggttccgagttggagactggacccggcccagacgtatagggtcacctgtttcatctcctggtcaccttgcttctcctgtgctcgcgaagtggcagaatttcttcaggaaaacccacacgtgaatttgagaatctttgccgcccggatctatgattgccgacctcggtatgaagaaggattgcaaatgctgcaaaatgctggtgcccaggtgtccatcatgacctctgaggagttccgccactgttgggacacctttgtggaccatcagggacacccgttccagccctgggaaggcctcgatgagcattcccaggccctgtccagaagattgcaggccattcttcaaggtaatcggtggatgatcctgagcctgggcactagttctggcggatctagcggagggtcctctggctctgagacaccaggaacaagcgagtcagcaacaccagagagttcaggcggcagcagtggcggcagcgctagcgataaaaagtattctattggtttagccatcggcactaattccgttggatgggctgtcataaccgatgaatacaaagtaccttcaaagaaatttaaggtgttggggaacacagaccgtcattcgattaaaaagaatcttatcggtgccctcctattcgatagtggcgaaacggcagaggcgactcgcctgaaacgaaccgctcggagaaggtatacacgtcgcaagaaccgaatatgttacttacaagaaatttttagcaatgagatggccaaagttgacgattctttctttcaccgtttggaagagtccttccttgtcgaagaggacaagaaacatgaacggcaccccatctttggaaacatagtagatgaggtggcatatcatgaaaagtacccaacgatttatcacctcagaaaaaagctagttgactcaactgataaagcggacctgaggttaatctacttggctcttgcccatatgataaagttccgtgggcactttctcattgagggtgatctaaatccggacaactcggatgtcgacaaactgttcatccagttagtacaaacctataatcagttgtttgaagagaaccctataaatgcaagtggcgtggatgcgaaggctattcttagcgcccgcctctctaaatcccgacggctagaaaacctgatcgcacaattacccggagagaagaaaaatgggttgttcggtaaccttatagcgctctcactaggcctgacaccaaattttaagtcgaacttcgacttagctgaagatgccaaattgcagcttagtaaggacacgtacgatgacgatctcgacaatctactggcacaaattggagatcagtatgcggacttatttttggctgccaaaaaccttagcgatgcaatcctcctatctgacatactgagagttaatactgagattaccaaggcgccgttatccgcttcaatgatcaaaaggtacgatgaacatcaccaagacttgacacttctcaaggccctagtccgtcagcaactgcctgagaaatataaggaaatattctttgatcagtcgaaaaacgggtacgcaggttatattgacggcggagcgagtcaagaggaattctacaagtttatcaaacccatattagagaagatggatgggacggaagagttgcttgtaaaactcaatcgcgaagatctactgcgaaagcagcggactttcgacaacggtagcattccacatcaaatccacttaggcgaattgcatgctatacttagaaggcaggaggatttttatccgttcctcaaagacaatcgtgaaaagattgagaaaatcctaacctttcgcataccttactatgtgggacccctggcccgagggaactctcggttcgcatggatgacaagaaagtccgaagaaacgattactccatggaattttgaggaagttgtcgataaaggtgcgtcagctcaatcgttcatcgagaggatgaccaactttgacaagaatttaccgaacgaaaaagtattgcctaagcacagtttactttacgagtatttcacagtgtacaatgaactcacgaaagttaagtatgtcactgagggcatgcgtaaacccgcctttctaagcggagaacagaagaaagcaatagtagatctgttattcaagaccaaccgcaaagtgacagttaagcaattgaaagaggactactttaagaaaattgaatgcttcgattctgtcgagatctccggggtagaagatcgatttaatgcgtcacttggtacgtatcatgacctcctaaagataattaaagataaggacttcctggataacgaagagaatgaagatatcttagaagatatagtgttgactcttaccctctttgaagatcgggaaatgattgaggaaagactaaaaacatacgctcacctgttcgacgataaggttatgaaacagttaaagaggcgtcgctatacgggctggggacgattgtcgcggaaacttatcaacgggataagagacaagcaaagtggtaaaactattctcgattttctaaagagcgacggcttcgccaataggaactttatgcagctgatccatgatgactctttaaccttcaaagaggatatacaaaaggcacaggtttccggacaaggggactcattgcacgaacatattgcgaatcttgctggttcgccagccatcaaaaagggcatactccagacagtcaaagtagtggatgagctagttaaggtcatgggacgtcacaaaccggaaaacattgtaatcgagatggcacgcgaaaatcaaacgactcagaaggggcaaaaaaacagtcgagagcggatgaagagaatagaagagggtattaaagaactgggcagccagatcttaaaggagcatcctgtggaaaatacccaattgcagaacgagaaactttacctctattacctacaaaatggaagggacatgtatgttgatcaggaactggacataaaccgtttatctgattacgacgtcgatcacattgtaccccaatcctttttgaaggacgattcaatcgacaataaagtgcttacacgctcggataagaaccgagggaaaagtgacaatgttccaagcgaggaagtcgtaaagaaaatgaagaactattggcggcagctcctaaatgcgaaactgataacgcaaagaaagttcgataacttaactaaagctgagaggggtggcttgtctgaacttgacaaggccggatttattaaacgtcagctcgtggaaacccgccaaatcacaaagcatgttgcacagatactagattcccgaatgaatacgaaatacgacgagaacgataagctgattcgggaagtcaaagtaatcactttaaagtcaaaattggtgtcggacttcagaaaggattttcaattctataaagttagggagataaataactaccaccatgcgcacgacgcttatcttaatgccgtcgtagggaccgcactcattaagaaatacccgaagctagaaagtgagtttgtgtatggtgattacaaagtttatgacgtccgtaagatgatcgcgaaaagcgaacaggagataggcaaggctacagccaaatacttcttttattctaacattatgaatttctttaagacggaaatcactctggcaaacggagagatacgcaaacgacctttaattgaaaccaatggggagacaggtgaaatcgtatgggataagggccgggacttcgcgacggtgagaaaagttttgtccatgccccaagtcaacatagtaaagaaaactgaggtgcagaccggagggttttcaaaggaatcgattcttccaaaaaggaatagtgataagctcatcgctcgtaaaaaggactgggacccgaaaaagtacggtggcttcgatagccctacagttgcctattctgtcctagtagtggcaaaagttgagaagggaaaatccaagaaactgaagtcagtcaaagaattattggggataacgattatggagcgctcgtcttttgaaaagaaccccatcgacttccttgaggcgaaaggttacaaggaagtaaaaaaggatctcataattaaactaccaaagtatagtctgtttgagttagaaaatggccgaaaacggatgttggctagcgccggagagcttcaaaaggggaacgaactcgcactaccgtctaaatacgtgaatttcctgtatttagcgtcccattacgagaagttgaaaggttcacctgaagataacgaacagaagcaactttttgttgagcagcacaaacattatctcgacgaaatcatagagcaaatttcggaattcagtaagagagtcatcctagctgatgccaatctggacaaagtattaagcgcatacaacaagcacagggataaacccatacgtgagcaggcggaaaatattatccatttgtttactcttaccaacctcggcgctccagccgcattcaagtattttgacacaacgatagatcgcaaacgatacacttctaccaaggaggtgctagacgcgacactgattcaccaatccatcacgggattatatgaaactcggatagatttgtcacagcttgggggtgaccctaggcccggggagctctatccatacgatgtccccgactacgcatatccctatgatgtacctgattatgcgtatccttatgacgtgccagactacgcggatatcaaaagaaccgccgacggcagcgagttcgagcccaagaagaagaggaaagtctgaggatccgcaggcctctcctagcttgactgactgagatacagcgtaccttcagctcacagacatgataagatacattgatgagtttggacaaaccacaactagaatgcagtgaaaaaaatgctttatttgtgaaatttgtgatgctattgctttatttgtaaccattataagctgcaataaacaagttaacaacaacaattgcattcattttatgtttcaggttcagggggaggtgtgggaggttttttaaagcaagtaaaacctctacaaatgtggtattggcccatctctatcggtatcgtagcataaccccttggggcctctaaacgggtcttgaggggttttttgtgcccctcgggccggattgctatctaccggcattggcgcagaaaaaaatgcctgatgcgacgctgcgcgtcttatactcccacatatgccagattcagcaacggatacggcttccccaacttgcccacttccatacgtgtcctccttaccagaaatttatccttaaggtcgtcagctatcctgcaggcgatctctcgatttcgatcaagacattcctttaatggtcttttctggacaccactaggggtcagaagtagttcatcaaactttcttccctccctaatctcattggttaccttgggctatcgaaacttaattaaccagtcaagtcagctacttggcgagatcgacttgtctgggtttcgactacgctcagaattgcgtcagtcaagttcgatctggtccttgctattgcacccgttctccgattacgagtttcatttaaatcatgtgagcaaaaggccagcaaaaggccaggaaccgtaaaaaggccgcgttgctggcgtttttccataggctccgcccccctgacgagcatcacaaaaatcgacgctcaagtcagaggtggcgaaacccgacaggactataaagataccaggcgtttccccctggaagctccctcgtgcgctctcctgttccgaccctgccgcttaccggatacctgtccgcctttctcccttcgggaagcgtggcgctttctcatagctcacgctgtaggtatctcagttcggtgtaggtcgttcgctccaagctgggctgtgtgcacgaaccccccgttcagcccgaccgctgcgccttatccggtaactatcgtcttgagtccaacccggtaagacacgacttatcgccactggcagcagccactggtaacaggattagcagagcgaggtatgtaggcggtgctacagagttcttgaagtggtggcctaactacggctacactagaagaacagtatttggtatctgcgctctgctgaagccagttaccttcggaaaaagagttggtagctcttgatccggcaaacaaaccaccgctggtagcggtggtttttttgtttgcaagcagcagattacgcgcagaaaaaaaggatctcaagaagatcctttgatcttttctacggggtctgacgctcagtggaacgaaaactcacgttaagggattttggtcatgagattatcaaaaaggatcttcacctagatccttttaaattaaaaatgaagttttaaatcaatctaaagtatatatgagtaaacttggtctgacagttaccaatgcttaatcagtgaggcacctatctcagcgatctgtctatttcgttcatccatagttgcatttaaatttccgaactctccaaggccctcgtcggaaaatcttcaaacctttcgtccgatccatcttgcaggctacctctcgaacgaactatcgcaagtctcttggccggccttgcgccttggctattgcttggcagcgcctatcgccaggtattactccaatcccgaatatccgagatcgggatcacccgagagaagttcaacctacatcctcaatcccgatctatccgagatccgaggaatatcgaaatcggggcgcgcctggtgtaccgagaacgatcctctcagtgcgagtctcgacgatccatatcgttgcttggcagtcagccagtcggaatccagcttgggacccaggaagtccaatcgtcagatattgtactcaagcctggtcacggcagcgtaccgatctgtttaaacctagatattgatagtctgatcggtcaacgtataatcgagtcctagcttttgcaaacatctatcaagagacaggatcagcaggaggctttcgcatgagtattcaacatttccgtgtcgcccttattcccttttttgcggcattttgccttcctgtttttgctcacccagaaacgctggtgaaagtaaaagatgctgaagatcagttgggtgcgcgagtgggttacatcgaactggatctcaacagcggtaagatccttgagagttttcgccccgaagaacgctttccaatgatgagcacttttaaagttctgctatgtggcgcggtattatcccgtattgacgccgggcaagagcaactcggtcgccgcatacactattctcagaatgacttggttgagtattcaccagtcacagaaaagcatcttacggatggcatgacagtaagagaattatgcagtgctgccataaccatgagtgataacactgcggccaacttacttctgacaacgattggaggaccgaaggagctaaccgcttttttgcacaacatgggggatcatgtaactcgccttgatcgttgggaaccggagctgaatgaagccataccaaacgacgagcgtgacaccacgatgcctgtagcaatggcaacaaccttgcgtaaactattaactggcgaactacttactctagcttcccggcaacagttgatagactggatggaggcggataaagttgcaggaccacttctgcgctcggcccttccggctggctggtttattgctgataaatctggagccggtgagcgtgggtctcgcggtatcattgcagcactggggccagatggtaagccctcccgtatcgtagttatctacacgacggggagtcaggcaactatggatgaacgaaatagacagatcgctgagataggtgcctcactgattaagcattggtaaccgattctaggtgcattggcgcagaaaaaaatgcctgatgcgacgctgcgcgtcttatactcccacatatgccagattcagcaacggatacggcttccccaacttgcccacttccatacgtgtcctccttaccagaaatttatccttaagatcccgaatcgtttaaactcgactctggctctatcgaatctccgtcgtttcgagcttacgcgaacagccgtggcgctcatttgctcgtcgggcatcgaatctcgtcagctatcgtcagcttacctttttggcagcgatcgcggctcccgacatcttggaccattagctccacaggtatcttcttccctctagtggtcataacagcagcttcagctacctctcaattcaaaaaacccctcaagacccgtttagaggccccaaggggttatgctatcaatcgttgcgttacacacacaaaaaaccaacacacatccatcttcgatggatagcgattttattatctaactgctgatcgagtgtagccagatctagtaatcaattacggggtcattagttcatagcccatatatggagttccgcgttacataacttacggtaaatggcccgcctggctgaccgcccaacgacccccgcccattgacgtcaataatgacgtatgttcccatagtaacgccaatagggactttccattgacgtcaatgggtggagtatttacggtaaactgcccacttggcagtacatcaagtgtatcatatgccaagtacgccccctattgacgtcaatgacggtaaatggcccgcctggcattatgcccagtacatgaccttatgggactttcctacttggcagtacatctacgtattagtcatcgctattaccatgctgatgcggttttggcagtacatcaatgggcgtggatagcggtttgactcacggggatttccaagtctccaccccattgacgtcaatgggagtttgttttggcaccaaaatcaacgggactttccaaaatgtcgtaacaactccgccccattgacgcaaatgggcggtaggcgtgtacggtgggaggtctatataagcagagctggtttagtgaaccgtcagatcagatctttgtcgatcctaccatccactcgacacacccgccagcggccgctgccaagctt

SEQ ID NO: 1115 - DNA, 4669 bp, synthetic construct
  source 1..4669: mol_type = other DNA
gccgccaccatgggatctaccaacatttgtagtttcaaggacaggtgcgtgtccatcctgtgttgcaaattctgtaaacaagtgctcagctctaggggaatgaaggctgttttgctggctgatactgaaatagaccttttctctacagacatccctcctaccaacgcagtggacttcactggaagatgctatttcaccaaaatctgcaaatgtaaactgaaggacatcgcatgtttaaaatgtgggaacattgtaggttatcatgtgattgttccatgtagttcctgtcttctttcctgcaacaacggacacttctggatgtttcacagccaggcagtttatgatattaacagactagactccacaggtgtaaacgtcctactttggggcaacttgccagagatagaagagagtacagatgaagatgtgttaaatatctcagcagaggagtgtattagataaggatccgcaggcctctgctagcttgactgactgagatacagcgtaccttcagctcacagacatgataagatacattgatgagtttggacaaaccacaactagaatgcagtgaaaaaaatgctttatttgtgaaatttgtgatgctattgctttatttgtaaccattataagctgcaataaacaagttaacaacaacaattgcattcattttatgtttcaggttcagggggaggtgtgggaggttttttaaagcaagtaaaacctctacaaatgtggtattggcccatctctatcggtatcgtagcataaccccttggggcctctaaacgggtcttgaggggttttttgtgcccctcgggccggattgctatctaccggcattggcgcagaaaaaaatgcctgatgcgacgctgcgcgtcttatactcccacatatgccagattcagcaacggatacggcttccccaacttgcccacttccatacgtgtcctccttaccagaaatttatccttaaggtcgtcagctatcctgcaggcgatctctcgatttcgatcaagacattcctttaatggtcttttctggacaccactaggggtcagaagtagttcatcaaactttcttccctccctaatctcattggttaccttgggctatcgaaacttaattaaccagtcaagtcagctacttggcgagatcgacttgtctgggtttcgactacgctcagaattgcgtcagtcaagttcgatctggtccttgctattgcacccgttctccgattacgagtttcatttaaatcatgtgagcaaaaggccagcaaaaggccaggaaccgtaaaaaggccgcgttgctggcgtttttccataggctccgcccccctgacgagcatcacaaaaatcgacgctcaagtcagaggtggcgaaacccgacaggactataaagataccaggcgtttccccctggaagctccctcgtgcgctctcctgttccgaccctgccgcttaccggatacctgtccgcctttctcccttcgggaagcgtggcgctttctcatagctcacgctgtaggtatctcagttcggtgtaggtcgttcgctccaagctgggctgtgtgcacgaaccccccgttcagcccgaccgctgcgccttatccggtaactatcgtcttgagtccaacccggtaagacacgacttatcgccactggcagcagccactggtaacaggattagcagagcgaggtatgtaggcggtgctacagagttcttgaagtggtggcctaactacggctacactagaagaacagtatttggtatctgcgctctgctgaagccagttaccttcggaaaaagagttggtagctcttgatccggcaaacaaaccaccgctggtagcggtggtttttttgtttgcaagcagcagattacgcgcagaaaaaaaggatctcaagaagatcctttgatcttttctacggggtctgacgctcagtggaacgaaaactcacgttaagggattttggtcatgagattatcaaaaaggatcttcacctagatccttttaaattaaaaatgaagttttaaatcaatctaaagtatatatgagtaaacttggtctgacagttaccaatgcttaatcagtgaggcacctatctcagcgatctgtctatttcgttcatccatagttgcatttaaatttccgaactctccaaggccctcgtcggaaaatcttcaaacctttcgtccgatccatcttgcaggctacctctcgaacgaactatcgcaagtctcttggccggccttgcgccttggctattgcttggcagcgcctatcgccaggtattactccaatcccgaatatccgagatcgggatcacccgagagaagttcaacctacatcctcaatcccgatctatccgagatccgaggaatatcgaaatcggggcgcgcctggtgtaccgagaacgatcctctcagtgcgagtctcgacgatccatatcgttgcttggcagtcagccagtcggaatccagcttgggacccaggaagtccaatcgtcagatattgtactcaagcctggtcacggcagcgtaccgatctgtttaaacctagatattgatagtctgatcggtcaacgtataatcgagtcctagcttttgcaaacatctatcaagagacaggatcagcaggaggctttcgcatgagtattcaacatttccgtgtcgcccttattcccttttttgcggcattttgccttcctgtttttgctcacccagaaacgctggtgaaagtaaaagatgctgaagatcagttgggtgcgcgagtgggttacatcgaactggatctcaacagcggtaagatccttgagagttttcgccccgaagaacgctttccaatgatgagcacttttaaagttctgctatgtggcgcggtattatcccgtattgacgccgggcaagagcaactcggtcgccgcatacactattctcagaatgacttggttgagtattcaccagtcacagaaaagcatcttacggatggcatgacagtaagagaattatgcagtgctgccataaccatgagtgataacactgcggccaacttacttctgacaacgattggaggaccgaaggagctaaccgcttttttgcacaacatgggggatcatgtaactcgccttgatcgttgggaaccggagctgaatgaagccataccaaacgacgagcgtgacaccacgatgcctgtagcaatggcaacaaccttgcgtaaactattaactggcgaactacttactctagcttcccggcaacagttgatagactggatggaggcggataaagttgcaggaccacttctgcgctcggcccttccggctggctggtttattgctgataaatctggagccggtgagcgtgggtctcgcggtatcattgcagcactggggccagatggtaagccctcccgtatcgtagttatctacacgacggggagtcaggcaactatggatgaacgaaatagacagatcgctgagataggtgcctcactgattaagcattggtaaccgattctaggtgcattggcgcagaaaaaaatgcctgatgcgacgctgcgcgtcttatactcccacatatgccagattcagcaacggatacggcttccccaacttgcccacttccatacgtgtcctccttaccagaaatttatccttaagatcccgaatcgtttaaactcgactctggctctatcgaatctccgtcgtttcgagcttacgcgaacagccgtggcgctcatttgctcgtcgggcatcgaatctcgtcagctatcgtcagcttacctttttggcagcgatcgcggctcccgacatcttggaccattagctccacaggtatcttcttccctctagtggtcataacagcagcttcagctacctctcaattcaaaaaacccctcaagacccgtttagaggccccaaggggttatgctatcaatcgttgcgttacacacacaaaaaaccaacacacatccatcttcgatggatagcgattttattatctaactgctgatcgagtgtagccagatctagtaatcaattacggggtcattagttcatagcccatatatggagttccgcgttacataacttacggtaaatggcccgcctggctgaccgcccaacgacccccgcccattgacgtcaataatgacgtatgttcccatagtaacgccaatagggactttccattgacgtcaatgggtggagtatttacggtaaactgcccacttggcagtacatcaagtgtatcatatgccaagtacgccccctattgacgtcaatgacggtaaatggcccgcctggcattatgcccagtacatgaccttatgggactttcctacttggcagtacatctacgtattagtcatcgctattaccatgctgatgcggttttggcagtacatcaatgggcgtggatagcggtttgactcacggggatttccaagtctccaccccattgacgtcaatgggagtttgttttggcaccaaaatcaacgggactttccaaaatgtcgtaacaactccgccccattgacgcaaatgggcggtaggcgtgtacggtgggaggtctatataagcagagctggtttagtgaaccgtcagatcagatctttgtcgatcctaccatccactcgacacacccgccagcggccgctgccaagctt

SEQ ID NO: 1116 - DNA, 20 bp, synthetic construct
  source 1..20: mol_type = other DNA
ggcccagactgagcacgtga

SEQ ID NO: 1117 - DNA, 20 bp, synthetic construct
  source 1..20: mol_type = other DNA
ttgccacgaagcaggccaat

SEQ ID NO: 1118 - DNA, 150 bp, synthetic construct
  source 1..150: mol_type = other DNA
gcatgcatttgtaggcttgatgctttttttctgcttctccagccctggcctgggtcaatccttggggcccagactgagcacgtgatggcagaggaaaggaagccctgcttcctccagagggcgtcgcaggacagcttttcctagacaggg

SEQ ID NO: 1119 - DNA, 150 bp, synthetic construct
  source 1..150: mol_type = other DNA
ggaggaggaagggcctgagtccgagcagaagaagaagggctcccatcacatcaaccggtggcgcattgccacgaagcaggccaatggggaggacatcgatgtcacctccaatgactagggtgggcaaccacaaacccacgagggcagagt

SEQ ID NO: 1120 - protein, 428 aa, unidentified
MQRVFVLDHNKQPLMPCHPARARKLLKKGKAAVYRRYPFAIIMTHRVGGDLQTVEIKFDPGSRTTGIALVGDFDRGKEVIWAGNLNHRGHQIKSNLNSRRAIRRARRNRKTRYRQARFNNRRRPKGWLPPSLRSRVDNTKNWMHKLARLAPLTQIAVETVRFDTQKLQKPEISGVEYQQGELAGYELREYLLEKWGRECAYCGAKNIPLEIEHIQARSKGGSDRVSNLTLACTPCNIDKGNKDIKEFLSLKPKRLKKIQATATAPLKDAAAVNATRYATGNVLKCFSLPITFSSGGRTKFNRVKLGYLKDHWIDAACVGESGSQVVIPKAITPLIITSKGRGSRQKCRMNQYGFPRTGPKKQKQVKGFQTGDIVKAIVTKGKKIGTYIGRVVVRSRGSFDIGSGEKKVGSISYKYCQLLQRADGYEYT

SEQ ID NO: 1121 - protein, 150 aa, unidentified
MGSTNICSFKDRCVSILCCKFCKQVLSSRGMKAVLLADTEIDLFSTDIPPTNAVDFTGRCYFTKICKCKLKDIACLKCGNIVGYHVIVPCSSCLLSCNNGHFWMFHSQAVYDINRLDSTGVNVLLWGNLPEIEESTDEDVLNISAEECIR

SEQ ID NO: 1122 - protein, 494 aa, unidentified
MDMVYVLNKDGKPLMATTRGGRVRYLLKEKKARVVSSTPFTIQLNYDTPDATQDLILGIDPGRTNIGVAVVKEDGQCVFSAHLETRNKEVPLLMKKRAAFRRQHRTQDRRRKRQRRAIAAGTTVESNTIERLLPGYEKPIVCHHIRNKEARFNNRSRPAGWLTPTANHLLQAHINLIAKAAKFLPITKVVVELNRFAFMAMDNPNIRRWEYQQGPLYGLGSVKDAVYAQQDGHCLFCKKPIDHYHHVVPRHKGGSETLANRCGLCEKHHALVHKDKAWAEKLVTRKGGMNKKYHALSVLNQIIPHLMEYIGSETLYDAYATDGRSTKGFRIAKNVPKEHYTDAYCIACSILDADTKVSTPVEPFELKQFRRHDRQACIRQMVDRKYLLHGKVVAANRHKAIEQKSDSLEEFREAHGNAAVSQLTVKPHHSQCKDMARIMPGAMMDFDGIVGVFKGSSGRNNGTPNYYNSTKGERFLTRSCVLLAQNAGMVFIPA

SEQ ID NO: 1123 - protein, 423 aa, unidentified
MQNYTFVLDTNKQPLFPVHPAVARKMLSNAEAAVFRRYPFTIILKHGADRPTQSIEIKLDPGSKTTGIALLKGERLIFAAELSHRGQAIKASLDARRAIRRNRRTRHTRYRPARFLNRTRSKGWLTPSLKHRVCTTLTWVNKFIRFAPVNSIAMELVRFDLQQLENPEISGVEYQQGELLGYEIREYLLNKWDRKCTYCGAENIPLQVEHIHPRAKGGSNRISNLCLACEKCNLKKGTQDIKDFLSKKTDLLKQIMAQAKRPLKDASAVNSTRWALFNQLKLTGLPVTTGSGGQTKYNRTRLELPKTHYFDAACVGKVDKLVVLTTQPLLIKANGHGTRQMCRTDKFGFPSRHAPRNKFVKGFQTGDIVKAIVTSGKKIGEYVGRAAVRSSGSFNISAKELVQGIGHKYCEILHRKDGYSYQF

SEQ ID NO: 1124 - protein, 428 aa, unidentified
VSKVFVLDTNKQPLNPIHSGRARMLLSQGKAAVFRGFPFTLILKEEVSSPDVKPLRIKIDPGAKTTGLALVNDKTGEVVWVAELQHRDFQIRDALTSRRQLRRFRRSRKTRYRKPRFLNRTRPKGWLPPSLNSRVANILTWVKRLSSLCQINAISQELVRFDTQQMENPEISGTGYQQGTLAGYEIREFLLEKWNRTCAYCGAKDTKLEIEHIQPRSKGGSNRVSNLCLACVPCNREKGNQDIKDFLKGKPDLLKRILGQAKRPLADTSAVNATRWNLYDNLRQTSLPVEVGTGGLTKYNRTIRGLDKTHYWDAACVGASTPERLITSGIKPLLISAKGHGTRQQCRTNKLGFPVRYCSRTKFHKGFQTGDIVKAVVTSGKKVGTYVGRVATRATLRFNISTKDGLVQGISHKYCKHIHKKDGYAYAY

SEQ ID NO: 1125 - protein, 493 aa, unidentified
MSKTNYVLVVDTNKHPLSPCKPGVARSLLKAGKAAVFRRYTFTIILKKEVEGDILKSQIKIDPGSKTTGLALVQNGVVIWAAELQHRGQLIKQSLDNRRSLRRNRRNRKTRYRQPRFLNRVKSKPKGWLAPSLMHRVENVSTWVNKLIKFSAVDSVMMELVRFDTQKMTNPDVSGVQYQQGELTGYEVREYLLEKFDRTCVYCQAKNVPLEVEHIQPKSKGGSNRISNLTLACRPCNQSKGNQDIQDFLSGKPSLLKRILNQTKQPLKDAAAVNSTRWKLKESLELTGLPVFTGNGALTKYNRCRLGLPKTHWLDAASVGEIDNLVIATHQPLLIKSFGFGSRQMCRTDKYGFPTRHCSRQKVHFGFTTGDIVKADIPKGKYAGKYTARVTVRSTGSFAIKSLTHGKQIDVNHKYCKAIHKLDGYGYGFGELININPTKLNPVETQIVKGRTAANPTQLNLFDSSIFAVESSESKIHKKQKVKGDDYEQLSLF

SEQ ID NO: 1126 - protein, 428 aa, unidentified
MSKVFVLDTNKQPLNPIHPGRARMLLSQRKAAVFRRYPLTLILKEEVLNPDIEPLRIKIDPGAKTTGLALVNDSTGEVVWIAELQHRGFQIRDALTSRRQLRKSRRSRKTRYRKPRGLNRTRPTGWLPPSLNSRVANILTWVKRLSSLCQINAISQELVRFDTQQMENPEISGIAYQQGTLAGYEVREFLLFKWDRTCAYCGAKDTKLEVEHIQSRSKGGSNRVSNLCLACVPCNREKGNQDIKDFLKGKPDLRKQILAQAKRPLADAAAVNVTRWNLYFNLKKMGLPVEIGTGGRTKYNRTKLLLEKTHYWDAACVGESTPERLITAGIKPLLINAKGHGTRQQCRPNKFGFPVRYCSRTKFHKGFQTGDIVKAVVTSGKKVGTHQGRVATRATGRFNISTTDGLVQGISHKYCKHIHKKDGYAYVA

SEQ ID NO: 1127 - protein, 424 aa, unidentified
MSNFVFVIDTNHKPLSPCKPGMARSLLKAGKAAVFRRYPFTIILKKAVETNPEPLELKLDPGSKVTGIAIKQGDKIIFGAELQHRGQQIKEALLSCRQLRRGRRNRKTRYRQARFLNRTRPDGWLAPSLQHRIETALTWVRKLIRFAPIARIVQELVRFDTQLIQNPEISGVLYQQGELQGYEVREYLLEKWNRQCAYCSAQNVPFEVEHIQPKSKGGSDRVPNLTLACHDCNQKKGNQDVRAFLATKPDLLNRILKQAKLPLKDAAAVNSTRWALFNALKETGLPVTTGTGGQTKFNRNRLGLPKSHWLDAACVGNFEALEVLTSKPLLIAAKGHGTRQMCGTNKYGFPTRHKSRVQIHKGYQTGDIVSATVTAGKKVGSYIGRVLCRASGSFDIATKTGRITGISHKYCNPIHKKDGYSYAF

SEQ ID NO: 1128 - protein, 1369 aa, unidentified
MAPKKKRKVGGGGSMTDSQNDTDEYWMGEALKLAQKAWDEGEVPVGAILVRKGEVIGHGWNRSIGSHDPSAHAEIMAIREAGVRIGNYRMLDTVLYVTLEPCAMCAGALVHGRISRLVFGAENPKTGACGSVMDIARHPALNHQLQVDGGVMAAPCARLLSDFFRWRRAQKKAARDNSSGNGTSGGSSGGSSGSETPGTSESATPESSGGSSGGSGTSTDMKNYRIGVAVGDRSVGLAAIEFDDDGLPIQKLALVTFRHDGGLDPTKNKTPMSRKETRGIARRTMRMNRERKRRLRNLDNVLENLGYSVPEGPEPETYEAWTSRALLASIKLASADELNEHLVRAVRHMARHRGWANPWWSLDQLEKASQEPSETFEIILARARELFGEKVPANPTLGMLGALAANNEVLLRPRDEKKRKTGYVRGTPLMFAQVRQGDQLAELRRICEVQGIEDQYEALRLGVFDHKHPYVPKERVGKDPLNPSTNRTIRASLEFQEFRILDSVANLRVRIGSRAKRELTEAEYDAAVEFLMDYADKEQPSWADVAEKIGVPGNRLVAPVLEDVQQKTAPYDRSSAAFEKAMGKKTEARQWWESTDDDQLRSLLIAFLVDATNDTEEAAAEAGLSELYKSWPAEEREALSNIDFEKGRVAYSQETLSKLSEYMHEYRVGLHEARKAVFGVDDTWRPPLDKLEEPTGQPAVDRVLTILRRFVLDCERQWGRPRAITVEHTRTGLMGPTQRQKILNEQKKNRADNERIRDELRESGVDNPSRAEVRRHLIVQEQECQCLYCGTMITTTTSELDHIVPRAGGGSSRRENLAAVCRACNAKKKRELFYAWAGPVKSQETIERVRQLKAFKDSKKAKMFKNQIRRLNQTEADEPIDERSLASTSYAAVAVRERLEQHFNEGLALDDKSRVVLDVYAGAVTRESRRAGGIDERILLRGERDKNRFDVRHHAVDAAVMTLLNRSVALTLEQRSQLRRAFYEQGLDKLDRDQLKPEEDWRNFIGLSLASQEKFLEWKKVTTVLGDLLAEAIEDDSIAVVSPLRLRPQNGRVHKDTIAAVKKQTLGSAWSADAVKRIVDPEIYLAMKDALGKSKVLPEDSARTLELSDGRYLEADDEVLFFPKNAASILTPRGVAEIGGSIHHARLYSWLTKKGELKIGMLRVYGAEFPWLMRESGSHDVLRMPIHPGSQSFRDMQDTTRKAVESSEAVEFAWITQNDELEFEPEDYIAHGGKDELRQFLEFMPECRWRVDGFKKNYQIRIRPAMLSREQLPSDIQRRLESKTLTENESLLLKALDTGLVVAIGGLLPLGTLKVIRRNNLGFPRWRGNGNLPTSFEVRSSALRALGVEGSGGKRPAATKKAGQAKKKK

SEQ ID NO: 1129 - protein, 1381 aa, synthetic construct
MAPKKKRKVGGGGSMTDSQNDTDEYWMGEALKLAQKAWDEGEVPVGAILVRKGEVIGHGWNRSIGSHDPSAHAEIMAIREAGVRIGNYRMLDTVLYVTLEPCAMCAGALVHGRISRLVFGAENPKTGACGSVMDIARHPALNHQLQVDGGVMAAPCARLLSDFFRWRRAQKKAARDNSSGNGTKGKGKGMGAGTLSTDKGESLGIKYEEGQSHRPTNPNASRMAQKVGTSTDMKNYRIGVAVGDRSVGLAAIEFDDDGLPIQKLALVTFRHDGGLDPTKNKTPMSRKETRGIARRTMRMNRERKRRLRNLDNVLENLGYSVPEGPEPETYEAWTSRALLASIKLASADELNEHLVRAVRHMARHRGWANPWWSLDQLEKASQEPSETFEIILARARELFGEKVPANPTLGMLGALAANNEVLLRPRDEKKRKTGYVRGTPLMFAQVRQGDQLAELRRICEVQGIEDQYEALRLGVFDHKHPYVPKERVGKDPLNPSTNRTIRASLEFQEFRILDSVANLRVRIGSRAKRELTEAEYDAAVEFLMDYADKEQPSWADVAEKIGVPGNRLVAPVLEDVQQKTAPYDRSSAAFEKAMGKKTEARQWWESTDDDQLRSLLIAFLVDATNDTEEAAAEAGLSELYKSWPAEEREALSNIDFEKGRVAYSQETLSKLSEYMHEYRVGLHEARKAVFGVDDTWRPPLDKLEEPTGQPAVDRVLTILRRFVLDCERQWGRPRAITVEHTRTGLMGPTQRQKILNEQKKNRADNERIRDELRESGVDNPSRAEVRRHLIVQEQECQCLYCGTMITTTTSELDHIVPRAGGGSSRRENLAAVCRACNAKKKRELFYAWAGPVKSQETIERVRQLKAFKDSKKAKMFKNQIRRLNQTEADEPIDERSLASTSYAAVAVRERLEQHFNEGLALDDKSRVVLDVYAGAVTRESRRAGGIDERILLRGERDKNRFDVRHHAVDAAVMTLLNRSVALTLEQRSQLRRAFYEQGLDKLDRDQLKPEEDWRNFIGLSLASQEKFLEWKKVTTVLGDLLAEAIEDDSIAVVSPLRLRPQNGRVHKDTIAAVKKQTLGSAWSADAVKRIVDPEIYLAMKDALGKSKVLPEDSARTLELSDGRYLEADDEVLFFPKNAASILTPRGVAEIGGSIHHARLYSWLTKKGELKIGMLRVYGAEFPWLMRESGSHDVLRMPIHPGSQSFRDMQDTTRKAVESSEAVEFAWITQNDELEFEPEDYIAHGGKDELRQFLEFMPECRWRVDGFKKNYQIRIRPAMLSREQLPSDIQRRLESKTLTENESLLLKALDTGLVVAIGGLLPLGTLKVIRRNNLGFPRWRGNGNLPTSFEVRSSALRALGVEGSGGKRPAATKKAGQAKKKK

SEQ ID NO: 1130 - protein, 1395 aa, unidentified
MAPKKKRKVGGGGSMTDSQNDTDEYWMGEALKLAQKAWDEGEVPVGAILVRKGEVIGHGWNRSIGSHDPSAHAEIMAIREAGVRIGNYRMLDTVLYVTLEPCAMCAGALVHGRISRLVFGAENPKTGACGSVMDIARHPALNHQLQVDGGVMAAPCARLLSDFFRWRRAQKKAARDNSSGNGTCYGKKYGPKGKGKGMGAGTLSTDKGESLGIKYEEGQSHRPTNPNASRMAQKVGGSDGCGTSTDMKNYRIGVAVGDRSVGLAAIEFDDDGLPIQKLALVTFRHDGGLDPTKNKTPMSRKETRGIARRTMRMNRERKRRLRNLDNVLENLGYSVPEGPEPETYEAWTSRALLASIKLASADELNEHLVRAVRHMARHRGWANPWWSLDQLEKASQEPSETFEIILARARELFGEKVPANPTLGMLGALAANNEVLLRPRDEKKRKTGYVRGTPLMFAQVRQGDQLAELRRICEVQGIEDQYEALRLGVFDHKHPYVPKERVGKDPLNPSTNRTIRASLEFQEFRILDSVANLRVRIGSRAKRELTEAEYDAAVEFLMDYADKEQPSWADVAEKIGVPGNRLVAPVLEDVQQKTAPYDRSSAAFEKAMGKKTEARQWWESTDDDQLRSLLIAFLVDATNDTEEAAAEAGLSELYKSWPAEEREALSNIDFEKGRVAYSQETLSKLSEYMHEYRVGLHEARKAVFGVDDTWRPPLDKLEEPTGQPAVDRVLTILRRFVLDCERQWGRPRAITVEHTRTGLMGPTQRQKILNEQKKNRADNERIRDELRESGVDNPSRAEVRRHLIVQEQECQCLYCGTMITTTTSELDHIVPRAGGGSSRRENLAAVCRACNAKKKRELFYAWAGPVKSQETIERVRQLKAFKDSKKAKMFKNQIRRLNQTEADEPIDERSLASTSYAAVAVRERLEQHFNEGLALDDKSRVVLDVYAGAVTRESRRAGGIDERILLRGERDKNRFDVRHHAVDAAVMTLLNRSVALTLEQRSQLRRAFYEQGLDKLDRDQLKPEEDWRNFIGLSLASQEKFLEWKKVTTVLGDLLAEAIEDDSIAVVSPLRLRPQNGRVHKDTIAAVKKQTLGSAWSADAVKRIVDPEIYLAMKDALGKSKVLPEDSARTLELSDGRYLEADDEVLFFPKNAASILTPRGVAEIGGSIHHARLYSWLTKKGELKIGMLRVYGAEFPWLMRESGSHDVLRMPIHPGSQSFRDMQDTTRKAVESSEAVEFAWITQNDELEFEPEDYIAHGGKDELRQFLEFMPECRWRVDGFKKNYQIRIRPAMLSREQLPSDIQRRLESKTLTENESLLLKALDTGLVVAIGGLLPLGTLKVIRRNNLGFPRWRGNGNLPTSFEVRSSALRALGVEGSGGKRPAATKKAGQAKKKK

SEQ ID NO: 1131 - protein, 1353 aa, unidentified
MAPKKKRKVGGGGSMTDSQNDTDEYWMGEALKLAQKAWDEGEVPVGAILVRKGEVIGHGWNRSIGSHDPSAHAEIMAIREAGVRIGNYRMLDTVLYVTLEPCAMCAGALVHGRISRLVFGAENPKTGACGSVMDIARHPALNHQLQVDGGVMAAPCARLLSDFFRWRRAQKKAARDNSSGNGTSGSETPGTSESATPESGTSTDMKNYRIGVAVGDRSVGLAAIEFDDDGLPIQKLALVTFRHDGGLDPTKNKTPMSRKETRGIARRTMRMNRERKRRLRNLDNVLENLGYSVPEGPEPETYEAWTSRALLASIKLASADELNEHLVRAVRHMARHRGWANPWWSLDQLEKASQEPSETFEIILARARELFGEKVPANPTLGMLGALAANNEVLLRPRDEKKRKTGYVRGTPLMFAQVRQGDQLAELRRICEVQGIEDQYEALRLGVFDHKHPYVPKERVGKDPLNPSTNRTIRASLEFQEFRILDSVANLRVRIGSRAKRELTEAEYDAAVEFLMDYADKEQPSWADVAEKIGVPGNRLVAPVLEDVQQKTAPYDRSSAAFEKAMGKKTEARQWWESTDDDQLRSLLIAFLVDATNDTEEAAAEAGLSELYKSWPAEEREALSNIDFEKGRVAYSQETLSKLSEYMHEYRVGLHEARKAVFGVDDTWRPPLDKLEEPTGQPAVDRVLTILRRFVLDCERQWGRPRAITVEHTRTGLMGPTQRQKILNEQKKNRADNERIRDELRESGVDNPSRAEVRRHLIVQEQECQCLYCGTMITTTTSELDHIVPRAGGGSSRRENLAAVCRACNAKKKRELFYAWAGPVKSQETIERVRQLKAFKDSKKAKMFKNQIRRLNQTEADEPIDERSLASTSYAAVAVRERLEQHFNEGLALDDKSRVVLDVYAGAVTRESRRAGGIDERILLRGERDKNRFDVRHHAVDAAVMTLLNRSVALTLEQRSQLRRAFYEQGLDKLDRDQLKPEEDWRNFIGLSLASQEKFLEWKKVTTVLGDLLAEAIEDDSIAVVSPLRLRPQNGRVHKDTIAAVKKQTLGSAWSADAVKRIVDPEIYLAMKDALGKSKVLPEDSARTLELSDGRYLEADDEVLFFPKNAASILTPRGVAEIGGSIHHARLYSWLTKKGELKIGMLRVYGAEFPWLMRESGSHDVLRMPIHPGSQSFRDMQDTTRKAVESSEAVEFAWITQNDELEFEPEDYIAHGGKDELRQFLEFMPECRWRVDGFKKNYQIRIRPAMLSREQLPSDIQRRLESKTLTENESLLLKALDTGLVVAIGGLLPLGTLKVIRRNNLGFPRWRGNGNLPTSFEVRSSALRALGVEGSGGKRPAATKKAGQAKKKK

SEQ ID NO: 1132 - protein, 1369 aa, unidentified
MAPKKKRKVGGGGSSTDMKNYRIGVAVGDRSVGLAAIEFDDDGLPIQKLALVTFRHDGGLDPTKNKTPMSRKETRGIARRTMRMNRERKRRLRNLDNVLENLGYSVPEGPEPETYEAWTSRALLASIKLASADELNEHLVRAVRHMARHRGWANPWWSLDQLEKASQEPSETFEIILARARELFGEKVPANPTLGMLGALAANNEVLLRPRDEKKRKTGYVRGTPLMFAQVRQGDQLAELRRICEVQGIEDQYEALRLGVFDHKHPYVPKERVGKDPLNPSTNRTIRASLEFQEFRILDSVANLRVRIGSRAKRELTEAEYDAAVEFLMDYADKEQPSWADVAEKIGVPGNRLVAPVLEDVQQKTAPYDRSSAAFEKAMGKKTEARQWWESTDDDQLRSLLIAFLVDATNDTEEAAAEAGLSELYKSWPAEEREALSNIDFEKGRVAYSQETLSKLSEYMHEYRVGLHEARKAVFGVDDTWRPPLDKLEEPTGQPAVDRVLTILRRFVLDCERQWGRPRAITVEHTRTGLMGPTQRQKILNEQKKNRADNERIRDELRESGVDNPSRAEVRRHLIVQEQECQCLYCGTMITTTTSELDHIVPRAGGGSSRRENLAAVCRACNAKKKRELFYAWAGPVKSQETIERVRQLKAFKDSKKAKMFKNQIRRLNQTEADEPIDERSLASTSYAAVAVRERLEQHFNEGLALDDKSRVVLDVYAGAVTRESRRAGGIDERILLRGERDKNRFDVRHHAVDAAVMTLLNRSVALTLEQRSQLRRAFYEQGLDKLDRDQLKPEEDWRNFIGLSLASQEKFLEWKKVTTVLGDLLAEAIEDDSIAVVSPLRLRPQNGRVHKDTIAAVKKQTLGSAWSADAVKRIVDPEIYLAMKDALGKSKVLPEDSARTLELSDGRYLEADDEVLFFPKNAASILTPRGVAEIGGSIHHARLYSWLTKKGELKIGMLRVYGAEFPWLMRESGSHDVLRMPIHPGSQSFRDMQDTTRKAVESSEAVEFAWITQNDELEFEPEDYIAHGGKDELRQFLEFMPECRWRVDGFKKNYQIRIRPAMLSREQLPSDIQRRLESKTLTENESLLLKALDTGLVVAIGGLLPLGTLKVIRRNNLGFPRWRGNGNLPTSFEVRSSALRALGVEGGTSGGSSGGSSGSETPGTSESATPESSGGSSGGSGTMTDSQNDTDEYWMGEALKLAQKAWDEGEVPVGAILVRKGEVIGHGWNRSIGSHDPSAHAEIMAIREAGVRIGNYRMLDTVLYVTLEPCAMCAGALVHGRISRLVFGAENPKTGACGSVMDIARHPALNHQLQVDGGVMAAPCARLLSDFFRWRRAQKKAARDNSSGNSGGKRPAATKKAGQAKKKK

SEQ ID NO: 1133 - protein, 1381 aa, unidentified
MAPKKKRKVGGGGSSTDMKNYRIGVAVGDRSVGLAAIEFDDDGLPIQKLALVTFRHDGGLDPTKNKTPMSRKETRGIARRTMRMNRERKRRLRNLDNVLENLGYSVPEGPEPETYEAWTSRALLASIKLASADELNEHLVRAVRHMARHRGWANPWWSLDQLEKASQEPSETFEIILARARELFGEKVPANPTLGMLGALAANNEVLLRPRDEKKRKTGYVRGTPLMFAQVRQGDQLAELRRICEVQGIEDQYEALRLGVFDHKHPYVPKERVGKDPLNPSTNRTIRASLEFQEFRILDSVANLRVRIGSRAKRELTEAEYDAAVEFLMDYADKEQPSWADVAEKIGVPGNRLVAPVLEDVQQKTAPYDRSSAAFEKAMGKKTEARQWWESTDDDQLRSLLIAFLVDATNDTEEAAAEAGLSELYKSWPAEEREALSNIDFEKGRVAYSQETLSKLSEYMHEYRVGLHEARKAVFGVDDTWRPPLDKLEEPTGQPAVDRVLTILRRFVLDCERQWGRPRAITVEHTRTGLMGPTQRQKILNEQKKNRADNERIRDELRESGVDNPSRAEVRRHLIVQEQECQCLYCGTMITTTTSELDHIVPRAGGGSSRRENLAAVCRACNAKKKRELFYAWAGPVKSQETIERVRQLKAFKDSKKAKMFKNQIRRLNQTEADEPIDERSLASTSYAAVAVRERLEQHFNEGLALDDKSRVVLDVYAGAVTRESRRAGGIDERILLRGERDKNRFDVRHHAVDAAVMTLLNRSVALTLEQRSQLRRAFYEQGLDKLDRDQLKPEEDWRNFIGLSLASQEKFLEWKKVTTVLGDLLAEAIEDDSIAVVSPLRLRPQNGRVHKDTIAAVKKQTLGSAWSADAVKRIVDPEIYLAMKDALGKSKVLPEDSARTLELSDGRYLEADDEVLFFPKNAASILTPRGVAEIGGSIHHARLYSWLTKKGELKIGMLRVYGAEFPWLMRESGSHDVLRMPIHPGSQSFRDMQDTTRKAVESSEAVEFAWITQNDELEFEPEDYIAHGGKDELRQFLEFMPECRWRVDGFKKNYQIRIRPAMLSREQLPSDIQRRLESKTLTENESLLLKALDTGLVVAIGGLLPLGTLKVIRRNNLGFPRWRGNGNLPTSFEVRSSALRALGVEGGTKGKGKGMGAGTLSTDKGESLGIKYEEGQSHRPTNPNASRMAQKVGTMTDSQNDTDEYWMGEALKLAQKAWDEGEVPVGAILVRKGEVIGHGWNRSIGSHDPSAHAEIMAIREAGVRIGNYRMLDTVLYVTLEPCAMCAGALVHGRISRLVFGAENPKTGACGSVMDIARHPALNHQLQVDGGVMAAPCARLLSDFFRWRRAQKKAARDNSSGNSGGKRPAATKKAGQAKKKK

SEQ ID NO: 1134 - protein, 1395 aa, unidentified
MAPKKKRKVGGGGSSTDMKNYRIGVAVGDRSVGLAAIEFDDDGLPIQKLALVTFRHDGGLDPTKNKTPMSRKETRGIARRTMRMNRERKRRLRNLDNVLENLGYSVPEGPEPETYEAWTSRALLASIKLASADELNEHLVRAVRHMARHRGWANPWWSLDQLEKASQEPSETFEIILARARELFGEKVPANPTLGMLGALAANNEVLLRPRDEKKRKTGYVRGTPLMFAQVRQGDQLAELRRICEVQGIEDQYEALRLGVFDHKHPYVPKERVGKDPLNPSTNRTIRASLEFQEFRILDSVANLRVRIGSRAKRELTEAEYDAAVEFLMDYADKEQPSWADVAEKIGVPGNRLVAPVLEDVQQKTAPYDRSSAAFEKAMGKKTEARQWWESTDDDQLRSLLIAFLVDATNDTEEAAAEAGLSELYKSWPAEEREALSNIDFEKGRVAYSQETLSKLSEYMHEYRVGLHEARKAVFGVDDTWRPPLDKLEEPTGQPAVDRVLTILRRFVLDCERQWGRPRAITVEHTRTGLMGPTQRQKILNEQKKNRADNERIRDELRESGVDNPSRAEVRRHLIVQEQECQCLYCGTMITTTTSELDHIVPRAGGGSSRRENLAAVCRACNAKKKRELFYAWAGPVKSQETIERVRQLKAFKDSKKAKMFKNQIRRLNQTEADEPIDERSLASTSYAAVAVRERLEQHFNEGLALDDKSRVVLDVYAGAVTRESRRAGGIDERILLRGERDKNRFDVRHHAVDAAVMTLLNRSVALTLEQRSQLRRAFYEQGLDKLDRDQLKPEEDWRNFIGLSLASQEKFLEWKKVTTVLGDLLAEAIEDDSIAVVSPLRLRPQNGRVHKDTIAAVKKQTLGSAWSADAVKRIVDPEIYLAMKDALGKSKVLPEDSARTLELSDGRYLEADDEVLFFPKNAASILTPRGVAEIGGSIHHARLYSWLTKKGELKIGMLRVYGAEFPWLMRESGSHDVLRMPIHPGSQSFRDMQDTTRKAVESSEAVEFAWITQNDELEFEPEDYIAHGGKDELRQFLEFMPECRWRVDGFKKNYQIRIRPAMLSREQLPSDIQRRLESKTLTENESLLLKALDTGLVVAIGGLLPLGTLKVIRRNNLGFPRWRGNGNLPTSFEVRSSALRALGVEGGTCYGKKYGPKGKGKGMGAGTLSTDKGESLGIKYEEGQSHRPTNPNASRMAQKVGGSDGCGTMTDSQNDTDEYWMGEALKLAQKAWDEGEVPVGAILVRKGEVIGHGWNRSIGSHDPSAHAEIMAIREAGVRIGNYRMLDTVLYVTLEPCAMCAGALVHGRISRLVFGAENPKTGACGSVMDIARHPALNHQLQVDGGVMAAPCARLLSDFFRWRRAQKKAARDNSSGNSGGKRPAATKKAGQAKKKK

SEQ ID NO: 1135 - protein, 1353 aa, unidentified
MAPKKKRKVGGGGSSTDMKNYRIGVAVGDRSVGLAAIEFDDDGLPIQKLALVTFRHDGGLDPTKNKTPMSRKETRGIARRTMRMNRERKRRLRNLDNVLENLGYSVPEGPEPETYEAWTSRALLASIKLASADELNEHLVRAVRHMARHRGWANPWWSLDQLEKASQEPSETFEIILARARELFGEKVPANPTLGMLGALAANNEVLLRPRDEKKRKTGYVRGTPLMFAQVRQGDQLAELRRICEVQGIEDQYEALRLGVFDHKHPYVPKERVGKDPLNPSTNRTIRASLEFQEFRILDSVANLRVRIGSRAKRELTEAEYDAAVEFLMDYADKEQPSWADVAEKIGVPGNRLVAPVLEDVQQKTAPYDRSSAAFEKAMGKKTEARQWWESTDDDQLRSLLIAFLVDATNDTEEAAAEAGLSELYKSWPAEEREALSNIDFEKGRVAYSQETLSKLSEYMHEYRVGLHEARKAVFGVDDTWRPPLDKLEEPTGQPAVDRVLTILRRFVLDCERQWGRPRAITVEHTRTGLMGPTQRQKILNEQKKNRADNERIRDELRESGVDNPSRAEVRRHLIVQEQECQCLYCGTMITTTTSELDHIVPRAGGGSSRRENLAAVCRACNAKKKRELFYAWAGPVKSQETIERVRQLKAFKDSKKAKMFKNQIRRLNQTEADEPIDERSLASTSYAAVAVRERLEQHFNEGLALDDKSRVVLDVYAGAVTRESRRAGGIDERILLRGERDKNRFDVRHHAVDAAVMTLLNRSVALTLEQRSQLRRAFYEQGLDKLDRDQLKPEEDWRNFIGLSLASQEKFLEWKKVTTVLGDLLAEAIEDDSIAVVSPLRLRPQNGRVHKDTIAAVKKQTLGSAWSADAVKRIVDPEIYLAMKDALGKSKVLPEDSARTLELSDGRYLEADDEVLFFPKNAASILTPRGVAEIGGSIHHARLYSWLTKKGELKIGMLRVYGAEFPWLMRESGSHDVLRMPIHPGSQSFRDMQDTTRKAVESSEAVEFAWITQNDELEFEPEDYIAHGGKDELRQFLEFMPECRWRVDGFKKNYQIRIRPAMLSREQLPSDIQRRLESKTLTENESLLLKALDTGLVVAIGGLLPLGTLKVIRRNNLGFPRWRGNGNLPTSFEVRSSALRALGVEGGTSGSETPGTSESATPESGTMTDSQNDTDEYWMGEALKLAQKAWDEGEVPVGAILVRKGEVIGHGWNRSIGSHDPSAHAEIMAIREAGVRIGNYRMLDTVLYVTLEPCAMCAGALVHGRISRLVFGAENPKTGACGSVMDIARHPALNHQLQVDGGVMAAPCARLLSDFFRWRRAQKKAARDNSSGNSGGKRPAATKKAGQAKKKK

SEQ ID NO: 1136 - protein, 1369 aa, unidentified
MAPKKKRKVGGGGSSTDMKNYRIGVAVGDRSVGLAAIEFGTSGSETPGTSESATPESMTDSQNDTDEYWMGEALKLAQKAWDEGEVPVGAILVRKGEVIGHGWNRSIGSHDPSAHAEIMAIREAGVRIGNYRMLDTVLYVTLEPCAMCAGALVHGRISRLVFGAENPKTGACGSVMDIARHPALNHQLQVDGGVMAAPCARLLSDFFRWRRAQKKAARDNSSGNSGSETPGTSESATPESGTDDDGLPIQKLALVTFRHDGGLDPTKNKTPMSRKETRGIARRTMRMNRERKRRLRNLDNVLENLGYSVPEGPEPETYEAWTSRALLASIKLASADELNEHLVRAVRHMARHRGWANPWWSLDQLEKASQEPSETFEIILARARELFGEKVPANPTLGMLGALAANNEVLLRPRDEKKRKTGYVRGTPLMFAQVRQGDQLAELRRICEVQGIEDQYEALRLGVFDHKHPYVPKERVGKDPLNPSTNRTIRASLEFQEFRILDSVANLRVRIGSRAKRELTEAEYDAAVEFLMDYADKEQPSWADVAEKIGVPGNRLVAPVLEDVQQKTAPYDRSSAAFEKAMGKKTEARQWWESTDDDQLRSLLIAFLVDATNDTEEAAAEAGLSELYKSWPAEEREALSNIDFEKGRVAYSQETLSKLSEYMHEYRVGLHEARKAVFGVDDTWRPPLDKLEEPTGQPAVDRVLTILRRFVLDCERQWGRPRAITVEHTRTGLMGPTQRQKILNEQKKNRADNERIRDELRESGVDNPSRAEVRRHLIVQEQECQCLYCGTMITTTTSELDHIVPRAGGGSSRRENLAAVCRACNAKKKRELFYAWAGPVKSQETIERVRQLKAFKDSKKAKMFKNQIRRLNQTEADEPIDERSLASTSYAAVAVRERLEQHFNEGLALDDKSRVVLDVYAGAVTRESRRAGGIDERILLRGERDKNRFDVRHHAVDAAVMTLLNRSVALTLEQRSQLRRAFYEQGLDKLDRDQLKPEEDWRNFIGLSLASQEKFLEWKKVTTVLGDLLAEAIEDDSIAVVSPLRLRPQNGRVHKDTIAAVKKQTLGSAWSADAVKRIVDPEIYLAMKDALGKSKVLPEDSARTLELSDGRYLEADDEVLFFPKNAASILTPRGVAEIGGSIHHARLYSWLTKKGELKIGMLRVYGAEFPWLMRESGSHDVLRMPIHPGSQSFRDMQDTTRKAVESSEAVEFAWITQNDELEFEPEDYIAHGGKDELRQFLEFMPECRWRVDGFKKNYQIRIRPAMLSREQLPSDIQRRLESKTLTENESLLLKALDTGLVVAIGGLLPLGTLKVIRRNNLGFPRWRGNGNLPTSFEVRSSALRALGVEGSGGKRPAATKKAGQAKKKK

SEQ ID NO: 1137 - protein, 1369 aa, unidentified
MAPKKKRKVGGGGSSTDMKNYRIGVAVGDRSVGLAAIEFDDDGLPIQKLALVTFRHDGGLDPTKNKTPMSRKETRGIARRTMRMNRERKRRLRNLDNVLENLGYSVPEGPEPETYEAWTSRALLASIKLASADELNEHLVRAVRHMARHRGWANPWWSLDQLEKASQEPSETFEIILARARELFGEKVPANPTLGMLGALAANNEVLLRPRDEKKGTSGSETPGTSESATPESMTDSQNDTDEYWMGEALKLAQKAWDEGEVPVGAILVRKGEVIGHGWNRSIGSHDPSAHAEIMAIREAGVRIGNYRMLDTVLYVTLEPCAMCAGALVHGRISRLVFGAENPKTGACGSVMDIARHPALNHQLQVDGGVMAAPCARLLSDFFRWRRAQKKAARDNSSGNSGSETPGTSESATPESGTRKTGYVRGTPLMFAQVRQGDQLAELRRICEVQGIEDQYEALRLGVFDHKHPYVPKERVGKDPLNPSTNRTIRASLEFQEFRILDSVANLRVRIGSRAKRELTEAEYDAAVEFLMDYADKEQPSWADVAEKIGVPGNRLVAPVLEDVQQKTAPYDRSSAAFEKAMGKKTEARQWWESTDDDQLRSLLIAFLVDATNDTEEAAAEAGLSELYKSWPAEEREALSNIDFEKGRVAYSQETLSKLSEYMHEYRVGLHEARKAVFGVDDTWRPPLDKLEEPTGQPAVDRVLTILRRFVLDCERQWGRPRAITVEHTRTGLMGPTQRQKILNEQKKNRADNERIRDELRESGVDNPSRAEVRRHLIVQEQECQCLYCGTMITTTTSELDHIVPRAGGGSSRRENLAAVCRACNAKKKRELFYAWAGPVKSQETIERVRQLKAFKDSKKAKMFKNQIRRLNQTEADEPIDERSLASTSYAAVAVRERLEQHFNEGLALDDKSRVVLDVYAGAVTRESRRAGGIDERILLRGERDKNRFDVRHHAVDAAVMTLLNRSVALTLEQRSQLRRAFYEQGLDKLDRDQLKPEEDWRNFIGLSLASQEKFLEWKKVTTVLGDLLAEAIEDDSIAVVSPLRLRPQNGRVHKDTIAAVKKQTLGSAWSADAVKRIVDPEIYLAMKDALGKSKVLPEDSARTLELSDGRYLEADDEVLFFPKNAASILTPRGVAEIGGSIHHARLYSWLTKKGELKIGMLRVYGAEFPWLMRESGSHDVLRMPIHPGSQSFRDMQDTTRKAVESSEAVEFAWITQNDELEFEPEDYIAHGGKDELRQFLEFMPECRWRVDGFKKNYQIRIRPAMLSREQLPSDIQRRLESKTLTENESLLLKALDTGLVVAIGGLLPLGTLKVIRRNNLGFPRWRGNGNLPTSFEVRSSALRALGVEGSGGKRPAATKKAGQAKKKK

SEQ ID NO: 1138 - protein, 1369 aa, unidentified
MAPKKKRKVGGGGSSTDMKNYRIGVAVGDRSVGLAAIEFDDDGLPIQKLALVTFRHDGGLDPTKNKTPMSRKETRGIARRTMRMNRERKRRLRNLDNVLENLGYSVPEGPEPETYEAWTSRALLASIKLASADELNEHLVRAVRHMARHRGWANPWWSLDQLEKASQEPSETFEIILARARELFGEKVPANPTLGMLGALAANNEVLLRPRDEKKRKTGYVRGTPLMFAQVRQGDQLAELRRICEVQGIEDQYEALRLGVFDHKHPYVPKERVGKDPGTSGSETPGTSESATPESMTDSQNDTDEYWMGEALKLAQKAWDEGEVPVGAILVRKGEVIGHGWNRSIGSHDPSAHAEIMAIREAGVRIGNYRMLDTVLYVTLEPCAMCAGALVHGRISRLVFGAENPKTGACGSVMDIARHPALNHQLQVDGGVMAAPCARLLSDFFRWRRAQKKAARDNSSGNSGSETPGTSESATPESGTLNPSTNRTIRASLEFQEFRILDSVANLRVRIGSRAKRELTEAEYDAAVEFLMDYADKEQPSWADVAEKIGVPGNRLVAPVLEDVQQKTAPYDRSSAAFEKAMGKKTEARQWWESTDDDQLRSLLIAFLVDATNDTEEAAAEAGLSELYKSWPAEEREALSNIDFEKGRVAYSQETLSKLSEYMHEYRVGLHEARKAVFGVDDTWRPPLDKLEEPTGQPAVDRVLTILRRFVLDCERQWGRPRAITVEHTRTGLMGPTQRQKILNEQKKNRADNERIRDELRESGVDNPSRAEVRRHLIVQEQECQCLYCGTMITTTTSELDHIVPRAGGGSSRRENLAAVCRACNAKKKRELFYAWAGPVKSQETIERVRQLKAFKDSKKAKMFKNQIRRLNQTEADEPIDERSLASTSYAAVAVRERLEQHFNEGLALDDKSRVVLDVYAGAVTRESRRAGGIDERILLRGERDKNRFDVRHHAVDAAVMTLLNRSVALTLEQRSQLRRAFYEQGLDKLDRDQLKPEEDWRNFIGLSLASQEKFLEWKKVTTVLGDLLAEAIEDDSIAVVSPLRLRPQNGRVHKDTIAAVKKQTLGSAWSADAVKRIVDPEIYLAMKDALGKSKVLPEDSARTLELSDGRYLEADDEVLFFPKNAASILTPRGVAEIGGSIHHARLYSWLTKKGELKIGMLRVYGAEFPWLMRESGSHDVLRMPIHPGSQSFRDMQDTTRKAVESSEAVEFAWITQNDELEFEPEDYIAHGGKDELRQFLEFMPECRWRVDGFKKNYQIRIRPAMLSREQLPSDIQRRLESKTLTENESLLLKALDTGLVVAIGGLLPLGTLKVIRRNNLGFPRWRGNGNLPTSFEVRSSALRALGVEGSGGKRPAATKKAGQAKKKK

SEQ ID NO: 1139 - protein, 1369 aa, unidentified
MAPKKKRKVGGGGSSTDMKNYRIGVAVGDRSVGLAAIEFDDDGLPIQKLALVTFRHDGGLDPTKNKTPMSRKETRGIARRTMRMNRERKRRLRNLDNVLENLGYSVPEGPEPETYEAWTSRALLASIKLASADELNEHLVRAVRHMARHRGWANPWWSLDQLEKASQEPSETFEIILARARELFGEKVPANPTLGMLGALAANNEVLLRPRDEKKRKTGYVRGTPLMFAQVRQGDQLAELRRICEVQGIEDQYEALRLGVFDHKHPYVPKERVGKDPLNPSTNRTIRASLEFQEFRILDSVANLRVRIGSGTSGSETPGTSESATPESMTDSQNDTDEYWMGEALKLAQKAWDEGEVPVGAILVRKGEVIGHGWNRSIGSHDPSAHAEIMAIREAGVRIGNYRMLDTVLYVTLEPCAMCAGALVHGRISRLVFGAENPKTGACGSVMDIARHPALNHQLQVDGGVMAAPCARLLSDFFRWRRAQKKAARDNSSGNSGSETPGTSESATPESGTRAKRELTEAEYDAAVEFLMDYADKEQPSWADVAEKIGVPGNRLVAPVLEDVQQKTAPYDRSSAAFEKAMGKKTEARQWWESTDDDQLRSLLIAFLVDATNDTEEAAAEAGLSELYKSWPAEEREALSNIDFEKGRVAYSQETLSKLSEYMHEYRVGLHEARKAVFGVDDTWRPPLDKLEEPTGQPAVDRVLTILRRFVLDCERQWGRPRAITVEHTRTGLMGPTQRQKILNEQKKNRADNERIRDELRESGVDNPSRAEVRRHLIVQEQECQCLYCGTMITTTTSELDHIVPRAGGGSSRRENLAAVCRACNAKKKRELFYAWAGPVKSQETIERVRQLKAFKDSKKAKMFKNQIRRLNQTEADEPIDERSLASTSYAAVAVRERLEQHFNEGLALDDKSRVVLDVYAGAVTRESRRAGGIDERILLRGERDKNRFDVRHHAVDAAVMTLLNRSVALTLEQRSQLRRAFYEQGLDKLDRDQLKPEEDWRNFIGLSLASQEKFLEWKKVTTVLGDLLAEAIEDDSIAVVSPLRLRPQNGRVHKDTIAAVKKQTLGSAWSADAVKRIVDPEIYLAMKDALGKSKVLPEDSARTLELSDGRYLEADDEVLFFPKNAASILTPRGVAEIGGSIHHARLYSWLTKKGELKIGMLRVYGAEFPWLMRESGSHDVLRMPIHPGSQSFRDMQDTTRKAVESSEAVEFAWITQNDELEFEPEDYIAHGGKDELRQFLEFMPECRWRVDGFKKNYQIRIRPAMLSREQLPSDIQRRLESKTLTENESLLLKALDTGLVVAIGGLLPLGTLKVIRRNNLGFPRWRGNGNLPTSFEVRSSALRALGVEGSGGKRPAATKKAGQAKKKK

SEQ ID NO: 1140 - protein, 1369 aa, unidentified
MAPKKKRKVGGGGSSTDMKNYRIGVAVGDRSVGLAAIEFDDDGLPIQKLALVTFRHDGGLDPTKNKTPMSRKETRGIARRTMRMNRERKRRLRNLDNVLENLGYSVPEGPEPETYEAWTSRALLASIKLASADELNEHLVRAVRHMARHRGWANPWWSLDQLEKASQEPSETFEIILARARELFGEKVPANPTLGMLGALAANNEVLLRPRDEKKRKTGYVRGTPLMFAQVRQGDQLAELRRICEVQGIEDQYEALRLGVFDHKHPYVPKERVGKDPLNPSTNRTIRASLEFQEFRILDSVANLRVRIGSRAKRELTEAEYDAAVEFLMDYADKEQPSWADVAEKIGVGTSGSETPGTSESATPESMTDSQNDTDEYWMGEALKLAQKAWDEGEVPVGAILVRKGEVIGHGWNRSIGSHDPSAHAEIMAIREAGVRIGNYRMLDTVLYVTLEPCAMCAGALVHGRISRLVFGAENPKTGACGSVMDIARHPALNHQLQVDGGVMAAPCARLLSDFFRWRRAQKKAARDNSSGNSGSETPGTSESATPESGTPGNRLVAPVLEDVQQKTAPYDRSSAAFEKAMGKKTEARQWWESTDDDQLRSLLIAFLVDATNDTEEAAAEAGLSELYKSWPAEEREALSNIDFEKGRVAYSQETLSKLSEYMHEYRVGLHEARKAVFGVDDTWRPPLDKLEEPTGQPAVDRVLTILRRFVLDCERQWGRPRAITVEHTRTGLMGPTQRQKILNEQKKNRADNERIRDELRESGVDNPSRAEVRRHLIVQEQECQCLYCGTMITTTTSELDHIVPRAGGGSSRRENLAAVCRACNAKKKRELFYAWAGPVKSQETIERVRQLKAFKDSKKAKMFKNQIRRLNQTEADEPIDERSLASTSYAAVAVRERLEQHFNEGLALDDKSRVVLDVYAGAVTRESRRAGGIDERILLRGERDKNRFDVRHHAVDAAVMTLLNRSVALTLEQRSQLRRAFYEQGLDKLDRDQLKPEEDWRNFIGLSLASQEKFLEWKKVTTVLGDLLAEAIEDDSIAVVSPLRLRPQNGRVHKDTIAAVKKQTLGSAWSADAVKRIVDPEIYLAMKDALGKSKVLPEDSARTLELSDGRYLEADDEVLFFPKNAASILTPRGVAEIGGSIHHARLYSWLTKKGELKIGMLRVYGAEFPWLMRESGSHDVLRMPIHPGSQSFRDMQDTTRKAVESSEAVEFAWITQNDELEFEPEDYIAHGGKDELRQFLEFMPECRWRVDGFKKNYQIRIRPAMLSREQLPSDIQRRLESKTLTENESLLLKALDTGLVVAIGGLLPLGTLKVIRRNNLGFPRWRGNGNLPTSFEVRSSALRALGVEGSGGKRPAATKKAGQAKKKK

SEQ ID NO: 1141 - protein, 1369 aa, unidentified
MAPKKKRKVGGGGSSTDMKNYRIGVAVGDRSVGLAAIEFDDDGLPIQKLALVTFRHDGGLDPTKNKTPMSRKETRGIARRTMRMNRERKRRLRNLDNVLENLGYSVPEGPEPETYEAWTSRALLASIKLASADELNEHLVRAVRHMARHRGWANPWWSLDQLEKASQEPSETFEIILARARELFGEKVPANPTLGMLGALAANNEVLLRPRDEKKRKTGYVRGTPLMFAQVRQGDQLAELRRICEVQGIEDQYEALRLGVFDHKHPYVPKERVGKDPLNPSTNRTIRASLEFQEFRILDSVANLRVRIGSRAKRELTEAEYDAAVEFLMDYADKEQPSWADVAEKIGVPGNRLVAPVLEDVQQKTAPYDRSSAAFEKAMGKKTEARQWWESTDDDQLRSLLIAFLVDATNDTEEAAAEAGLSGTSGSETPGTSESATPESMTDSQNDTDEYWMGEALKLAQKAWDEGEVPVGAILVRKGEVIGHGWNRSIGSHDPSAHAEIMAIREAGVRIGNYRMLDTVLYVTLEPCAMCAGALVHGRISRLVFGAENPKTGACGSVMDIARHPALNHQLQVDGGVMAAPCARLLSDFFRWRRAQKKAARDNSSGNSGSETPGTSESATPESGTELYKSWPAEEREALSNIDFEKGRVAYSQETLSKLSEYMHEYRVGLHEARKAVFGVDDTWRPPLDKLEEPTGQPAVDRVLTILRRFVLDCERQWGRPRAITVEHTRTGLMGPTQRQKILNEQKKNRADNERIRDELRESGVDNPSRAEVRRHLIVQEQECQCLYCGTMITTTTSELDHIVPRAGGGSSRRENLAAVCRACNAKKKRELFYAWAGPVKSQETIERVRQLKAFKDSKKAKMFKNQIRRLNQTEADEPIDERSLASTSYAAVAVRERLEQHFNEGLALDDKSRVVLDVYAGAVTRESRRAGGIDERILLRGERDKNRFDVRHHAVDAAVMTLLNRSVALTLEQRSQLRRAFYEQGLDKLDRDQLKPEEDWRNFIGLSLASQEKFLEWKKVTTVLGDLLAEAIEDDSIAVVSPLRLRPQNGRVHKDTIAAVKKQTLGSAWSADAVKRIVDPEIYLAMKDALGKSKVLPEDSARTLELSDGRYLEADDEVLFFPKNAASILTPRGVAEIGGSIHHARLYSWLTKKGELKIGMLRVYGAEFPWLMRESGSHDVLRMPIHPGSQSFRDMQDTTRKAVESSEAVEFAWITQNDELEFEPEDYIAHGGKDELRQFLEFMPECRWRVDGFKKNYQIRIRPAMLSREQLPSDIQRRLESKTLTENESLLLKALDTGLVVAIGGLLPLGTLKVIRRNNLGFPRWRGNGNLPTSFEVRSSALRALGVEGSGGKRPAATKKAGQAKKKK

SEQ ID NO: 1142 - protein, 1369 aa, unidentified
MAPKKKRKVGGGGSSTDMKNYRIGVAVGDRSVGLAAIEFDDDGLPIQKLALVTFRHDGGLDPTKNKTPMSRKETRGIARRTMRMNRERKRRLRNLDNVLENLGYSVPEGPEPETYEAWTSRALLASIKLASADELNEHLVRAVRHMARHRGWANPWWSLDQLEKASQEPSETFEIILARARELFGEKVPANPTLGMLGALAANNEVLLRPRDEKKRKTGYVRGTPLMFAQVRQGDQLAELRRICEVQGIEDQYEALRLGVFDHKHPYVPKERVGKDPLNPSTNRTIRASLEFQEFRILDSVANLRVRIGSRAKRELTEAEYDAAVEFLMDYADKEQPSWADVAEKIGVPGNRLVAPVLEDVQQKTAPYDRSSAAFEKAMGKKTEARQWWESTDDDQLRSLLIAFLVDATNDTEEAAAEAGLSELYKSWPAEEREALSNIDFEKGRVAYSQETLSKLSEYMHEYRVGLHEARKAVFGVDDTWRPPLDKLEEPTGQPAVDRVLTILRRFVLDCERQWGRPRAITVEHTRTGLMGPTQRQKILNEQKKNRADNGTSGSETPGTSESATPESMTDSQNDTDEYWMGEALKLAQKAWDEGEVPVGAILVRKGEVIGHGWNRSIGSHDPSAHAEIMAIREAGVRIGNYRMLDTVLYVTLEPCAMCAGALVHGRISRLVFGAENPKTGACGSVMDIARHPALNHQLQVDGGVMAAPCARLLSDFFRWRRAQKKAARDNSSGNSGSETPGTSESATPESGTERIRDELRESGVDNPSRAEVRRHLIVQEQECQCLYCGTMITTTTSELDHIVPRAGGGSSRRENLAAVCRACNAKKKRELFYAWAGPVKSQETIERVRQLKAFKDSKKAKMFKNQIRRLNQTEADEPIDERSLASTSYAAVAVRERLEQHFNEGLALDDKSRVVLDVYAGAVTRESRRAGGIDERILLRGERDKNRFDVRHHAVDAAVMTLLNRSVALTLEQRSQLRRAFYEQGLDKLDRDQLKPEEDWRNFIGLSLASQEKFLEWKKVTTVLGDLLAEAIEDDSIAVVSPLRLRPQNGRVHKDTIAAVKKQTLGSAWSADAVKRIVDPEIYLAMKDALGKSKVLPEDSARTLELSDGRYLEADDEVLFFPKNAASILTPRGVAEIGGSIHHARLYSWLTKKGELKIGMLRVYGAEFPWLMRESGSHDVLRMPIHPGSQSFRDMQDTTRKAVESSEAVEFAWITQNDELEFEPEDYIAHGGKDELRQFLEFMPECRWRVDGFKKNYQIRIRPAMLSREQLPSDIQRRLESKTLTENESLLLKALDTGLVVAIGGLLPLGTLKVIRRNNLGFPRWRGNGNLPTSFEVRSSALRALGVEGSGGKRPAATKKAGQAKKKK

SEQ ID NO: 1143 - protein, 1369 aa, unidentified
MAPKKKRKVGGGGSSTDMKNYRIGVAVGDRSVGLAAIEFDDDGLPIQKLALVTFRHDGGLDPTKNKTPMSRKETRGIARRTMRMNRERKRRLRNLDNVLENLGYSVPEGPEPETYEAWTSRALLASIKLASADELNEHLVRAVRHMARHRGWANPWWSLDQLEKASQEPSETFEIILARARELFGEKVPANPTLGMLGALAANNEVLLRPRDEKKRKTGYVRGTPLMFAQVRQGDQLAELRRICEVQGIEDQYEALRLGVFDHKHPYVPKERVGKDPLNPSTNRTIRASLEFQEFRILDSVANLRVRIGSRAKRELTEAEYDAAVEFLMDYADKEQPSWADVAEKIGVPGNRLVAPVLEDVQQKTAPYDRSSAAFEKAMGKKTEARQWWESTDDDQLRSLLIAFLVDATNDTEEAAAEAGLSELYKSWPAEEREALSNIDFEKGRVAYSQETLSKLSEYMHEYRVGLHEARKAVFGVDDTWRPPLDKLEEPTGQPAVDRVLTILRRFVLDCERQWGRPRAITVEHTRTGLMGPTQRQKILNEQKKNRADNERIRDELRESGVDGTSGSETPGTSESATPESMTDSQNDTDEYWMGEALKLAQKAWDEGEVPVGAILVRKGEVIGHGWNRSIGSHDPSAHAEIMAIREAGVRIGNYRMLDTVLYVTLEPCAMCAGALVHGRISRLVFGAENPKTGACGSVMDIARHPALNHQLQVDGGVMAAPCARLLSDFFRWRRAQKKAARDNSSGNSGSETPGTSESATPESGTNPSRAEVRRHLIVQEQECQCLYCGTMITTTTSELDHIVPRAGGGSSRRENLAAVCRACNAKKKRELFYAWAGPVKSQETIERVRQLKAFKDSKKAKMFKNQIRRLNQTEADEPIDERSLASTSYAAVAVRERLEQHFNEGLALDDKSRVVLDVYAGAVTRESRRAGGIDERILLRGERDKNRFDVRHHAVDAAVMTLLNRSVALTLEQRSQLRRAFYEQGLDKLDRDQLKPEEDWRNFIGLSLASQEKFLEWKKVTTVLGDLLAEAIEDDSIAVVSPLRLRPQNGRVHKDTIAAVKKQTLGSAWSADAVKRIVDPEIYLAMKDALGKSKVLPEDSARTLELSDGRYLEADDEVLFFPKNAASILTPRGVAEIGGSIHHARLYSWLTKKGELKIGMLRVYGAEFPWLMRESGSHDVLRMPIHPGSQSFRDMQDTTRKAVESSEAVEFAWITQNDELEFEPEDYIAHGGKDELRQFLEFMPECRWRVDGFKKNYQIRIRPAMLSREQLPSDIQRRLESKTLTENESLLLKALDTGLVVAIGGLLPLGTLKVIRRNNLGFPRWRGNGNLPTSFEVRSSALRALGVEGSGGKRPAATKKAGQAKKKK

SEQ ID NO: 1144 - protein, 1369 aa, unidentified
MAPKKKRKVGGGGSSTDMKNYRIGVAVGDRSVGLAAIEFDDDGLPIQKLALVTFRHDGGLDPTKNKTPMSRKETRGIARRTMRMNRERKRRLRNLDNVLENLGYSVPEGPEPETYEAWTSRALLASIKLASADELNEHLVRAVRHMARHRGWANPWWSLDQLEKASQEPSETFEIILARARELFGEKVPANPTLGMLGALAANNEVLLRPRDEKKRKTGYVRGTPLMFAQVRQGDQLAELRRICEVQGIEDQYEALRLGVFDHKHPYVPKERVGKDPLNPSTNRTIRASLEFQEFRILDSVANLRVRIGSRAKRELTEAEYDAAVEFLMDYADKEQPSWADVAEKIGVPGNRLVAPVLEDVQQKTAPYDRSSAAFEKAMGKKTEARQWWESTDDDQLRSLLIAFLVDATNDTEEAAAEAGLSELYKSWPAEEREALSNIDFEKGRVAYSQETLSKLSEYMHEYRVGLHEARKAVFGVDDTWRPPLDKLEEPTGQPAVDRVLTILRRFVLDCERQWGRPRAITVEHTRTGLMGPTQRQKILNEQKKNRADNERIRDELRESGVDNPSRAEVRRHLIVQEQECQCLYCGTGTSGSETPGTSESATPESMTDSQNDTDEYWMGEALKLAQKAWDEGEVPVGAILVRKGEVIGHGWNRSIGSHDPSAHAEIMAIREAGVRIGNYRMLDTVLYVTLEPCAMCAGALVHGRISRLVFGAENPKTGACGSVMDIARHPALNHQLQVDGGVMAAPCARLLSDFFRWRRAQKKAARDNSSGNSGSETPGTSESATPESGTMITTTTSELDHIVPRAGGGSSRRENLAAVCRACNAKKKRELFYAWAGPVKSQETIERVRQLKAFKDSKKAKMFKNQIRRLNQTEADEPIDERSLASTSYAAVAVRERLEQHFNEGLALDDKSRVVLDVYAGAVTRESRRAGGIDERILLRGERDKNRFDVRHHAVDAAVMTLLNRSVALTLEQRSQLRRAFYEQGLDKLDRDQLKPEEDWRNFIGLSLASQEKFLEWKKVTTVLGDLLAEAIEDDSIAVVSPLRLRPQNGRVHKDTIAAVKKQTLGSAWSADAVKRIVDPEIYLAMKDALGKSKVLPEDSARTLELSDGRYLEADDEVLFFPKNAASILTPRGVAEIGGSIHHARLYSWLTKKGELKIGMLRVYGAEFPWLMRESGSHDVLRMPIHPGSQSFRDMQDTTRKAVESSEAVEFAWITQNDELEFEPEDYIAHGGKDELRQFLEFMPECRWRVDGFKKNYQIRIRPAMLSREQLPSDIQRRLESKTLTENESLLLKALDTGLVVAIGGLLPLGTLKVIRRNNLGFPRWRGNGNLPTSFEVRSSALRALGVEGSGGKRPAATKKAGQAKKKK

SEQ ID NO: 1145 - protein, 1369 aa, unidentified
MAPKKKRKVGGGGSSTDMKNYRIGVAVGDRSVGLAAIEFDDDGLPIQKLALVTFRHDGGLDPTKNKTPMSRKETRGIARRTMRMNRERKRRLRNLDNVLENLGYSVPEGPEPETYEAWTSRALLASIKLASADELNEHLVRAVRHMARHRGWANPWWSLDQLEKASQEPSETFEIILARARELFGEKVPANPTLGMLGALAANNEVLLRPRDEKKRKTGYVRGTPLMFAQVRQGDQLAELRRICEVQGIEDQYEALRLGVFDHKHPYVPKERVGKDPLNPSTNRTIRASLEFQEFRILDSVANLRVRIGSRAKRELTEAEYDAAVEFLMDYADKEQPSWADVAEKIGVPGNRLVAPVLEDVQQKTAPYDRSSAAFEKAMGKKTEARQWWESTDDDQLRSLLIAFLVDATNDTEEAAAEAGLSELYKSWPAEEREALSNIDFEKGRVAYSQETLSKLSEYMHEYRVGLHEARKAVFGVDDTWRPPLDKLEEPTGQPAVDRVLTILRRFVLDCERQWGRPRAITVEHTRTGLMGPTQRQKILNEQKKNRADNERIRDELRESGVDNPSRAEVRRHLIVQEQECQCLYCGTMITTTTSELDHIVPRAGTSGSETPGTSESATPESMTDSQNDTDEYWMGEALKLAQKAWDEGEVPVGAILVRKGEVIGHGWNRSIGSHDPSAHAEIMAIREAGVRIGNYRMLDTVLYVTLEPCAMCAGALVHGRISRLVFGAENPKTGACGSVMDIARHPALNHQLQVDGGVMAAPCARLLSDFFRWRRAQKKAARDNSSGNSGSETPGTSESATPESGTGGGSSRRENLAAVCRACNAKKKRELFYAWAGPVKSQETIERVRQLKAFKDSKKAKMFKNQIRRLNQTEADEPIDERSLASTSYAAVAVRERLEQHFNEGLALDDKSRVVLDVYAGAVTRESRRAGGIDERILLRGERDKNRFDVRHHAVDAAVMTLLNRSVALTLEQRSQLRRAFYEQGLDKLDRDQLKPEEDWRNFIGLSLASQEKFLEWKKVTTVLGDLLAEAIEDDSIAVVSPLRLRPQNGRVHKDTIAAVKKQTLGSAWSADAVKRIVDPEIYLAMKDALGKSKVLPEDSARTLELSDGRYLEADDEVLFFPKNAASILTPRGVAEIGGSIHHARLYSWLTKKGELKIGMLRVYGAEFPWLMRESGSHDVLRMPIHPGSQSFRDMQDTTRKAVESSEAVEFAWITQNDELEFEPEDYIAHGGKDELRQFLEFMPECRWRVDGFKKNYQIRIRPAMLSREQLPSDIQRRLESKTLTENESLLLKALDTGLVVAIGGLLPLGTLKVIRRNNLGFPRWRGNGNLPTSFEVRSSALRALGVEGSGGKRPAATKKAGQAKKKK

SEQ ID NO: 1146 - protein, 1369 aa, unidentified
MAPKKKRKVGGGGSSTDMKNYRIGVAVGDRSVGLAAIEFDDDGLPIQKLALVTFRHDGGLDPTKNKTPMSRKETRGIARRTMRMNRERKRRLRNLDNVLENLGYSVPEGPEPETYEAWTSRALLASIKLASADELNEHLVRAVRHMARHRGWANPWWSLDQLEKASQEPSETFEIILARARELFGEKVPANPTLGMLGALAANNEVLLRPRDEKKRKTGYVRGTPLMFAQVRQGDQLAELRRICEVQGIEDQYEALRLGVFDHKHPYVPKERVGKDPLNPSTNRTIRASLEFQEFRILDSVANLRVRIGSRAKRELTEAEYDAAVEFLMDYADKEQPSWADVAEKIGVPGNRLVAPVLEDVQQKTAPYDRSSAAFEKAMGKKTEARQWWESTDDDQLRSLLIAFLVDATNDTEEAAAEAGLSELYKSWPAEEREALSNIDFEKGRVAYSQETLSKLSEYMHEYRVGLHEARKAVFGVDDTWRPPLDKLEEPTGQPAVDRVLTILRRFVLDCERQWGRPRAITVEHTRTGLMGPTQRQKILNEQKKNRADNERIRDELRESGVDNPSRAEVRRHLIVQEQECQCLYCGTMITTTTSELDHIVPRAGGGSSRRENLAAVCRACNAKKKREGTSGSETPGTSESATPESMTDSQNDTDEYWMGEALKLAQKAWDEGEVPVGAILVRKGEVIGHGWNRSIGSHDPSAHAEIMAIREAGVRIGNYRMLDTVLYVTLEPCAMCAGALVHGRISRLVFGAENPKTGACGSVMDIARHPALNHQLQVDGGVMAAPCARLLSDFFRWRRAQKKAARDNSSGNSGSETPGTSESATPESGTLFYAWAGPVKSQETIERVRQLKAFKDSKKAKMFKNQIRRLNQTEADEPIDERSLASTSYAAVAVRERLEQHFNEGLALDDKSRVVLDVYAGAVTRESRRAGGIDERILLRGERDKNRFDVRHHAVDAAVMTLLNRSVALTLEQRSQLRRAFYEQGLDKLDRDQLKPEEDWRNFIGLSLASQEKFLEWKKVTTVLGDLLAEAIEDDSIAVVSPLRLRPQNGRVHKDTIAAVKKQTLGSAWSADAVKRIVDPEIYLAMKDALGKSKVLPEDSARTLELSDGRYLEADDEVLFFPKNAASILTPRGVAEIGGSIHHARLYSWLTKKGELKIGMLRVYGAEFPWLMRESGSHDVLRMPIHPGSQSFRDMQDTTRKAVESSEAVEFAWITQNDELEFEPEDYIAHGGKDELRQFLEFMPECRWRVDGFKKNYQIRIRPAMLSREQLPSDIQRRLESKTLTENESLLLKALDTGLVVAIGGLLPLGTLKVIRRNNLGFPRWRGNGNLPTSFEVRSSALRALGVEGSGGKRPAATKKAGQAKKKK

SEQ ID NO: 1147 - protein, 1369 aa, unidentified
MAPKKKRKVGGGGSSTDMKNYRIGVAVGDRSVGLAAIEFDDDGLPIQKLALVTFRHDGGLDPTKNKTPMSRKETRGIARRTMRMNRERKRRLRNLDNVLENLGYSVPEGPEPETYEAWTSRALLASIKLASADELNEHLVRAVRHMARHRGWANPWWSLDQLEKASQEPSETFEIILARARELFGEKVPANPTLGMLGALAANNEVLLRPRDEKKRKTGYVRGTPLMFAQVRQGDQLAELRRICEVQGIEDQYEALRLGVFDHKHPYVPKERVGKDPLNPSTNRTIRASLEFQEFRILDSVANLRVRIGSRAKRELTEAEYDAAVEFLMDYADKEQPSWADVAEKIGVPGNRLVAPVLEDVQQKTAPYDRSSAAFEKAMGKKTEARQWWESTDDDQLRSLLIAFLVDATNDTEEAAAEAGLSELYKSWPAEEREALSNIDFEKGRVAYSQETLSKLSEYMHEYRVGLHEARKAVFGVDDTWRPPLDKLEEPTGQPAVDRVLTILRRFVLDCERQWGRPRAITVEHTRTGLMGPTQRQKILNEQKKNRADNERIRDELRESGVDNPSRAEVRRHLIVQEQECQCLYCGTMITTTTSELDHIVPRAGGGSSRRENLAAVCRACNAKKKRELFYAWAGPVKSQETIERVRQLKAFKDSKKAKMFKNQIRRLNQGTSGSETPGTSESATPESMTDSQNDTDEYWMGEALKLAQKAWDEGEVPVGAILVRKGEVIGHGWNRSIGSHDPSAHAEIMAIREAGVRIGNYRMLDTVLYVTLEPCAMCAGALVHGRISRLVFGAENPKTGACGSVMDIARHPALNHQLQVDGGVMAAPCARLLSDFFRWRRAQKKAARDNSSGNSGSETPGTSESATPESGTTEADEPIDERSLASTSYAAVAVRERLEQHFNEGLALDDKSRVVLDVYAGAVTRESRRAGGIDERILLRGERDKNRFDVRHHAVDAAVMTLLNRSVALTLEQRSQLRRAFYEQGLDKLDRDQLKPEEDWRNFIGLSLASQEKFLEWKKVTTVLGDLLAEAIEDDSIAVVSPLRLRPQNGRVHKDTIAAVKKQTLGSAWSADAVKRIVDPEIYLAMKDALGKSKVLPEDSARTLELSDGRYLEADDEVLFFPKNAASILTPRGVAEIGGSIHHARLYSWLTKKGELKIGMLRVYGAEFPWLMRESGSHDVLRMPIHPGSQSFRDMQDTTRKAVESSEAVEFAWITQNDELEFEPEDYIAHGGKDELRQFLEFMPECRWRVDGFKKNYQIRIRPAMLSREQLPSDIQRRLESKTLTENESLLLKALDTGLVVAIGGLLPLGTLKVIRRNNLGFPRWRGNGNLPTSFEVRSSALRALGVEGSGGKRPAATKKAGQAKKKK

SEQ ID NO: 1148 - protein, 1369 aa, unidentified
MAPKKKRKVGGGGSSTDMKNYRIGVAVGDRSVGLAAIEFDDDGLPIQKLALVTFRHDGGLDPTKNKTPMSRKETRGIARRTMRMNRERKRRLRNLDNVLENLGYSVPEGPEPETYEAWTSRALLASIKLASADELNEHLVRAVRHMARHRGWANPWWSLDQLEKASQEPSETFEIILARARELFGEKVPANPTLGMLGALAANNEVLLRPRDEKKRKTGYVRGTPLMFAQVRQGDQLAELRRICEVQGIEDQYEALRLGVFDHKHPYVPKERVGKDPLNPSTNRTIRASLEFQEFRILDSVANLRVRIGSRAKRELTEAEYDAAVEFLMDYADKEQPSWADVAEKIGVPGNRLVAPVLEDVQQKTAPYDRSSAAFEKAMGKKTEARQWWESTDDDQLRSLLIAFLVDATNDTEEAAAEAGLSELYKSWPAEEREALSNIDFEKGRVAYSQETLSKLSEYMHEYRVGLHEARKAVFGVDDTWRPPLDKLEEPTGQPAVDRVLTILRRFVLDCERQWGRPRAITVEHTRTGLMGPTQRQKILNEQKKNRADNERIRDELRESGVDNPSRAEVRRHLIVQEQECQCLYCGTMITTTTSELDHIVPRAGGGSSRRENLAAVCRACNAKKKRELFYAWAGPVKSQETIERVRQLKAFKDSKKAKMFKNQIRRLNQTEADGTSGSETPGTSESATPESMTDSQNDTDEYWMGEALKLAQKAWDEGEVPVGAILVRKGEVIGHGWNRSIGSHDPSAHAEIMAIREAGVRIGNYRMLDTVLYVTLEPCAMCAGALVHGRISRLVFGAENPKTGACGSVMDIARHPALNHQLQVDGGVMAAPCARLLSDFFRWRRAQKKAARDNSSGNSGSETPGTSESATPESGTEPIDERSLASTSYAAVAVRERLEQHFNEGLALDDKSRVVLDVYAGAVTRESRRAGGIDERILLRGERDKNRFDVRHHAVDAAVMTLLNRSVALTLEQRSQLRRAFYEQGLDKLDRDQLKPEEDWRNFIGLSLASQEKFLEWKKVTTVLGDLLAEAIEDDSIAVVSPLRLRPQNGRVHKDTIAAVKKQTLGSAWSADAVKRIVDPEIYLAMKDALGKSKVLPEDSARTLELSDGRYLEADDEVLFFPKNAASILTPRGVAEIGGSIHHARLYSWLTKKGELKIGMLRVYGAEFPWLMRESGSHDVLRMPIHPGSQSFRDMQDTTRKAVESSEAVEFAWITQNDELEFEPEDYIAHGGKDELRQFLEFMPECRWRVDGFKKNYQIRIRPAMLSREQLPSDIQRRLESKTLTENESLLLKALDTGLVVAIGGLLPLGTLKVIRRNNLGFPRWRGNGNLPTSFEVRSSALRALGVEGSGGKRPAATKKAGQAKKKK

SEQ ID NO: 1149 - protein, 1369 aa, unidentified
MAPKKKRKVGGGGSSTDMKNYRIGVAVGDRSVGLAAIEFDDDGLPIQKLALVTFRHDGGLDPTKNKTPMSRKETRGIARRTMRMNRERKRRLRNLDNVLENLGYSVPEGPEPETYEAWTSRALLASIKLASADELNEHLVRAVRHMARHRGWANPWWSLDQLEKASQEPSETFEIILARARELFGEKVPANPTLGMLGALAANNEVLLRPRDEKKRKTGYVRGTPLMFAQVRQGDQLAELRRICEVQGIEDQYEALRLGVFDHKHPYVPKERVGKDPLNPSTNRTIRASLEFQEFRILDSVANLRVRIGSRAKRELTEAEYDAAVEFLMDYADKEQPSWADVAEKIGVPGNRLVAPVLEDVQQKTAPYDRSSAAFEKAMGKKTEARQWWESTDDDQLRSLLIAFLVDATNDTEEAAAEAGLSELYKSWPAEEREALSNIDFEKGRVAYSQETLSKLSEYMHEYRVGLHEARKAVFGVDDTWRPPLDKLEEPTGQPAVDRVLTILRRFVLDCERQWGRPRAITVEHTRTGLMGPTQRQKILNEQKKNRADNERIRDELRESGVDNPSRAEVRRHLIVQEQECQCLYCGTMITTTTSELDHIVPRAGGGSSRRENLAAVCRACNAKKKRELFYAWAGPVKSQETIERVRQLKAFKDSKKAKMFKNQIRRLNQTEADEPIDERSLASTSYAAVAVRERLEQHFNGTSGSETPGTSESATPESMTDSQNDTDEYWMGEALKLAQKAWDEGEVPVGAILVRKGEVIGHGWNRSIGSHDPSAHAEIMAIREAGVRIGNYRMLDTVLYVTLEPCAMCAGALVHGRISRLVFGAENPKTGACGSVMDIARHPALNHQLQVDGGVMAAPCARLLSDFFRWRRAQKKAARDNSSGNSGSETPGTSESATPESGTEGLALDDKSRVVLDVYAGAVTRESRRAGGIDERILLRGERDKNRFDVRHHAVDAAVMTLLNRSVALTLEQRSQLRRAFYEQGLDKLDRDQLKPEEDWRNFIGLSLASQEKFLEWKKVTTVLGDLLAEAIEDDSIAVVSPLRLRPQNGRVHKDTIAAVKKQTLGSAWSADAVKRIVDPEIYLAMKDALGKSKVLPEDSARTLELSDGRYLEADDEVLFFPKNAASILTPRGVAEIGGSIHHARLYSWLTKKGELKIGMLRVYGAEFPWLMRESGSHDVLRMPIHPGSQSFRDMQDTTRKAVESSEAVEFAWITQNDELEFEPEDYIAHGGKDELRQFLEFMPECRWRVDGFKKNYQIRIRPAMLSREQLPSDIQRRLESKTLTENESLLLKALDTGLVVAIGGLLPLGTLKVIRRNNLGFPRWRGNGNLPTSFEVRSSALRALGVEGSGGKRPAATKKAGQAKKKK

SEQ ID NO: 1150 - protein, 1369 aa, unidentified
MAPKKKRKVGGGGSSTDMKNYRIGVAVGDRSVGLAAIEFDDDGLPIQKLALVTFRHDGGLDPTKNKTPMSRKETRGIARRTMRMNRERKRRLRNLDNVLENLGYSVPEGPEPETYEAWTSRALLASIKLASADELNEHLVRAVRHMARHRGWANPWWSLDQLEKASQEPSETFEIILARARELFGEKVPANPTLGMLGALAANNEVLLRPRDEKKRKTGYVRGTPLMFAQVRQGDQLAELRRICEVQGIEDQYEALRLGVFDHKHPYVPKERVGKDPLNPSTNRTIRASLEFQEFRILDSVANLRVRIGSRAKRELTEAEYDAAVEFLMDYADKEQPSWADVAEKIGVPGNRLVAPVLEDVQQKTAPYDRSSAAFEKAMGKKTEARQWWESTDDDQLRSLLIAFLVDATNDTEEAAAEAGLSELYKSWPAEEREALSNIDFEKGRVAYSQETLSKLSEYMHEYRVGLHEARKAVFGVDDTWRPPLDKLEEPTGQPAVDRVLTILRRFVLDCERQWGRPRAITVEHTRTGLMGPTQRQKILNEQKKNRADNERIRDELRESGVDNPSRAEVRRHLIVQEQECQCLYCGTMITTTTSELDHIVPRAGGGSSRRENLAAVCRACNAKKKRELFYAWAGPVKSQETIERVRQLKAFKDSKKAKMFKNQIRRLNQTEADEPIDERSLASTSYAAVAVRERLEQHFNEGLALDDKGTSGSETPGTSESATPESMTDSQNDTDEYWMGEALKLAQKAWDEGEVPVGAILVRKGEVIGHGWNRSIGSHDPSAHAEIMAIREAGVRIGNYRMLDTVLYVTLEPCAMCAGALVHGRISRLVFGAENPKTGACGSVMDIARHPALNHQLQVDGGVMAAPCARLLSDFFRWRRAQKKAARDNSSGNSGSETPGTSESATPESGTSRVVLDVYAGAVTRESRRAGGIDERILLRGERDKNRFDVRHHAVDAAVMTLLNRSVALTLEQRSQLRRAFYEQGLDKLDRDQLKPEEDWRNFIGLSLASQEKFLEWKKVTTVLGDLLAEAIEDDSIAVVSPLRLRPQNGRVHKDTIAAVKKQTLGSAWSADAVKRIVDPEIYLAMKDALGKSKVLPEDSARTLELSDGRYLEADDEVLFFPKNAASILTPRGVAEIGGSIHHARLYSWLTKKGELKIGMLRVYGAEFPWLMRESGSHDVLRMPIHPGSQSFRDMQDTTRKAVESSEAVEFAWITQNDELEFEPEDYIAHGGKDELRQFLEFMPECRWRVDGFKKNYQIRIRPAMLSREQLPSDIQRRLESKTLTENESLLLKALDTGLVVAIGGLLPLGTLKVIRRNNLGFPRWRGNGNLPTSFEVRSSALRALGVEGSGGKRPAATKKAGQAKKKK

SEQ ID NO: 1151 - protein, 1369 aa, unidentified
MAPKKKRKVGGGGSSTDMKNYRIGVAVGDRSVGLAAIEFDDDGLPIQKLALVTFRHDGGLDPTKNKTPMSRKETRGIARRTMRMNRERKRRLRNLDNVLENLGYSVPEGPEPETYEAWTSRALLASIKLASADELNEHLVRAVRHMARHRGWANPWWSLDQLEKASQEPSETFEIILARARELFGEKVPANPTLGMLGALAANNEVLLRPRDEKKRKTGYVRGTPLMFAQVRQGDQLAELRRICEVQGIEDQYEALRLGVFDHKHPYVPKERVGKDPLNPSTNRTIRASLEFQEFRILDSVANLRVRIGSRAKRELTEAEYDAAVEFLMDYADKEQPSWADVAEKIGVPGNRLVAPVLEDVQQKTAPYDRSSAAFEKAMGKKTEARQWWESTDDDQLRSLLIAFLVDATNDTEEAAAEAGLSELYKSWPAEEREALSNIDFEKGRVAYSQETLSKLSEYMHEYRVGLHEARKAVFGVDDTWRPPLDKLEEPTGQPAVDRVLTILRRFVLDCERQWGRPRAITVEHTRTGLMGPTQRQKILNEQKKNRADNERIRDELRESGVDNPSRAEVRRHLIVQEQECQCLYCGTMITTTTSELDHIVPRAGGGSSRRENLAAVCRACNAKKKRELFYAWAGPVKSQETIERVRQLKAFKDSKKAKMFKNQIRRLNQTEADEPIDERSLASTSYAAVAVRERLEQHFNEGLALDDKSRVVLDVYAGAVTRESRRAGGGTSGSETPGTSESATPESMTDSQNDTDEYWMGEALKLAQKAWDEGEVPVGAILVRKGEVIGHGWNRSIGSHDPSAHAEIMAIREAGVRIGNYRMLDTVLYVTLEPCAMCAGALVHGRISRLVFGAENPKTGACGSVMDIARHPALNHQLQVDGGVMAAPCARLLSDFFRWRRAQKKAARDNSSGNSGSETPGTSESATPESGTIDERILLRGERDKNRFDVRHHAVDAAVMTLLNRSVALTLEQRSQLRRAFYEQGLDKLDRDQLKPEEDWRNFIGLSLASQEKFLEWKKVTTVLGDLLAEAIEDDSIAVVSPLRLRPQNGRVHKDTIAAVKKQTLGSAWSADAVKRIVDPEIYLAMKDALGKSKVLPEDSARTLELSDGRYLEADDEVLFFPKNAASILTPRGVAEIGGSIHHARLYSWLTKKGELKIGMLRVYGAEFPWLMRESGSHDVLRMPIHPGSQSFRDMQDTTRKAVESSEAVEFAWITQNDELEFEPEDYIAHGGKDELRQFLEFMPECRWRVDGFKKNYQIRIRPAMLSREQLPSDIQRRLESKTLTENESLLLKALDTGLVVAIGGLLPLGTLKVIRRNNLGFPRWRGNGNLPTSFEVRSSALRALGVEGSGGKRPAATKKAGQAKKKK

SEQ ID NO: 1152 - protein, 1369 aa, unidentified
MAPKKKRKVGGGGSSTDMKNYRIGVAVGDRSVGLAAIEFDDDGLPIQKLALVTFRHDGGLDPTKNKTPMSRKETRGIARRTMRMNRERKRRLRNLDNVLENLGYSVPEGPEPETYEAWTSRALLASIKLASADELNEHLVRAVRHMARHRGWANPWWSLDQLEKASQEPSETFEIILARARELFGEKVPANPTLGMLGALAANNEVLLRPRDEKKRKTGYVRGTPLMFAQVRQGDQLAELRRICEVQGIEDQYEALRLGVFDHKHPYVPKERVGKDPLNPSTNRTIRASLEFQEFRILDSVANLRVRIGSRAKRELTEAEYDAAVEFLMDYADKEQPSWADVAEKIGVPGNRLVAPVLEDVQQKTAPYDRSSAAFEKAMGKKTEARQWWESTDDDQLRSLLIAFLVDATNDTEEAAAEAGLSELYKSWPAEEREALSNIDFEKGRVAYSQETLSKLSEYMHEYRVGLHEARKAVFGVDDTWRPPLDKLEEPTGQPAVDRVLTILRRFVLDCERQWGRPRAITVEHTRTGLMGPTQRQKILNEQKKNRADNERIRDELRESGVDNPSRAEVRRHLIVQEQECQCLYCGTMITTTTSELDHIVPRAGGGSSRRENLAAVCRACNAKKKRELFYAWAGPVKSQETIERVRQLKAFKDSKKAKMFKNQIRRLNQTEADEPIDERSLASTSYAAVAVRERLEQHFNEGLALDDKSRVVLDVYAGAVTRESRRAGGIDERILLRGERDKNRFDVRHHAVDAAVMTLLNRSVALTLEQRSQLRRAFYEGTSGSETPGTSESATPESMTDSQNDTDEYWMGEALKLAQKAWDEGEVPVGAILVRKGEVIGHGWNRSIGSHDPSAHAEIMAIREAGVRIGNYRMLDTVLYVTLEPCAMCAGALVHGRISRLVFGAENPKTGACGSVMDIARHPALNHQLQVDGGVMAAPCARLLSDFFRWRRAQKKAARDNSSGNSGSETPGTSESATPESGTQGLDKLDRDQLKPEEDWRNFIGLSLASQEKFLEWKKVTTVLGDLLAEAIEDDSIAVVSPLRLRPQNGRVHKDTIAAVKKQTLGSAWSADAVKRIVDPEIYLAMKDALGKSKVLPEDSARTLELSDGRYLEADDEVLFFPKNAASILTPRGVAEIGGSIHHARLYSWLTKKGELKIGMLRVYGAEFPWLMRESGSHDVLRMPIHPGSQSFRDMQDTTRKAVESSEAVEFAWITQNDELEFEPEDYIAHGGKDELRQFLEFMPECRWRVDGFKKNYQIRIRPAMLSREQLPSDIQRRLESKTLTENESLLLKALDTGLVVAIGGLLPLGTLKVIRRNNLGFPRWRGNGNLPTSFEVRSSALRALGVEGSGGKRPAATKKAGQAKKKK

SEQ ID NO: 1153 - protein, 1369 aa, unidentified
MAPKKKRKVGGGGSSTDMKNYRIGVAVGDRSVGLAAIEFDDDGLPIQKLALVTFRHDGGLDPTKNKTPMSRKETRGIARRTMRMNRERKRRLRNLDNVLENLGYSVPEGPEPETYEAWTSRALLASIKLASADELNEHLVRAVRHMARHRGWANPWWSLDQLEKASQEPSETFEIILARARELFGEKVPANPTLGMLGALAANNEVLLRPRDEKKRKTGYVRGTPLMFAQVRQGDQLAELRRICEVQGIEDQYEALRLGVFDHKHPYVPKERVGKDPLNPSTNRTIRASLEFQEFRILDSVANLRVRIGSRAKRELTEAEYDAAVEFLMDYADKEQPSWADVAEKIGVPGNRLVAPVLEDVQQKTAPYDRSSAAFEKAMGKKTEARQWWESTDDDQLRSLLIAFLVDATNDTEEAAAEAGLSELYKSWPAEEREALSNIDFEKGRVAYSQETLSKLSEYMHEYRVGLHEARKAVFGVDDTWRPPLDKLEEPTGQPAVDRVLTILRRFVLDCERQWGRPRAITVEHTRTGLMGPTQRQKILNEQKKNRADNERIRDELRESGVDNPSRAEVRRHLIVQEQECQCLYCGTMITTTTSELDHIVPRAGGGSSRRENLAAVCRACNAKKKRELFYAWAGPVKSQETIERVRQLKAFKDSKKAKMFKNQIRRLNQTEADEPIDERSLASTSYAAVAVRERLEQHFNEGLALDDKSRVVLDVYAGAVTRESRRAGGIDERILLRGERDKNRFDVRHHAVDAAVMTLLNRSVALTLEQRSQLRRAFYEQGLGTSGSETPGTSESATPESMTDSQNDTDEYWMGEALKLAQKAWDEGEVPVGAILVRKGEVIGHGWNRSIGSHDPSAHAEIMAIREAGVRIGNYRMLDTVLYVTLEPCAMCAGALVHGRISRLVFGAENPKTGACGSVMDIARHPALNHQLQVDGGVMAAPCARLLSDFFRWRRAQKKAARDNSSGNSGSETPGTSESATPESGTDKLDRDQLKPEEDWRNFIGLSLASQEKFLEWKKVTTVLGDLLAEAIEDDSIAVVSPLRLRPQNGRVHKDTIAAVKKQTLGSAWSADAVKRIVDPEIYLAMKDALGKSKVLPEDSARTLELSDGRYLEADDEVLFFPKNAASILTPRGVAEIGGSIHHARLYSWLTKKGELKIGMLRVYGAEFPWLMRESGSHDVLRMPIHPGSQSFRDMQDTTRKAVESSEAVEFAWITQNDELEFEPEDYIAHGGKDELRQFLEFMPECRWRVDGFKKNYQIRIRPAMLSREQLPSDIQRRLESKTLTENESLLLKALDTGLVVAIGGLLPLGTLKVIRRNNLGFPRWRGNGNLPTSFEVRSSALRALGVEGSGGKRPAATKKAGQAKKKK

SEQ ID NO: 1154 - protein, 1369 aa, unidentified
MAPKKKRKVGGGGSSTDMKNYRIGVAVGDRSVGLAAIEFDDDGLPIQKLALVTFRHDGGLDPTKNKTPMSRKETRGIARRTMRMNRERKRRLRNLDNVLENLGYSVPEGPEPETYEAWTSRALLASIKLASADELNEHLVRAVRHMARHRGWANPWWSLDQLEKASQEPSETFEIILARARELFGEKVPANPTLGMLGALAANNEVLLRPRDEKKRKTGYVRGTPLMFAQVRQGDQLAELRRICEVQGIEDQYEALRLGVFDHKHPYVPKERVGKDPLNPSTNRTIRASLEFQEFRILDSVANLRVRIGSRAKRELTEAEYDAAVEFLMDYADKEQPSWADVAEKIGVPGNRLVAPVLEDVQQKTAPYDRSSAAFEKAMGKKTEARQWWESTDDDQLRSLLIAFLVDATNDTEEAAAEAGLSELYKSWPAEEREALSNIDFEKGRVAYSQETLSKLSEYMHEYRVGLHEARKAVFGVDDTWRPPLDKLEEPTGQPAVDRVLTILRRFVLDCERQWGRPRAITVEHTRTGLMGPTQRQKILNEQKKNRADNERIRDELRESGVDNPSRAEVRRHLIVQEQECQCLYCGTMITTTTSELDHIVPRAGGGSSRRENLAAVCRACNAKKKRELFYAWAGPVKSQETIERVRQLKAFKDSKKAKMFKNQIRRLNQTEADEPIDERSLASTSYAAVAVRERLEQHFNEGLALDDKSRVVLDVYAGAVTRESRRAGGIDERILLRGERDKNRFDVRHHAVDAAVMTLLNRSVALTLEQRSQLRRAFYEQGLDKLDGTSGSETPGTSESATPESMTDSQNDTDEYWMGEALKLAQKAWDEGEVPVGAILVRKGEVIGHGWNRSIGSHDPSAHAEIMAIREAGVRIGNYRMLDTVLYVTLEPCAMCAGALVHGRISRLVFGAENPKTGACGSVMDIARHPALNHQLQVDGGVMAAPCARLLSDFFRWRRAQKKAARDNSSGNSGSETPGTSESATPESGTRDQLKPEEDWRNFIGLSLASQEKFLEWKKVTTVLGDLLAEAIEDDSIAVVSPLRLRPQNGRVHKDTIAAVKKQTLGSAWSADAVKRIVDPEIYLAMKDALGKSKVLPEDSARTLELSDGRYLEADDEVLFFPKNAASILTPRGVAEIGGSIHHARLYSWLTKKGELKIGMLRVYGAEFPWLMRESGSHDVLRMPIHPGSQSFRDMQDTTRKAVESSEAVEFAWITQNDELEFEPEDYIAHGGKDELRQFLEFMPECRWRVDGFKKNYQIRIRPAMLSREQLPSDIQRRLESKTLTENESLLLKALDTGLVVAIGGLLPLGTLKVIRRNNLGFPRWRGNGNLPTSFEVRSSALRALGVEGSGGKRPAATKKAGQAKKKK

SEQ ID NO: 1155 - protein, 1369 aa, unidentified
MAPKKKRKVGGGGSSTDMKNYRIGVAVGDRSVGLAAIEFDDDGLPIQKLALVTFRHDGGLDPTKNKTPMSRKETRGIARRTMRMNRERKRRLRNLDNVLENLGYSVPEGPEPETYEAWTSRALLASIKLASADELNEHLVRAVRHMARHRGWANPWWSLDQLEKASQEPSETFEIILARARELFGEKVPANPTLGMLGALAANNEVLLRPRDEKKRKTGYVRGTPLMFAQVRQGDQLAELRRICEVQGIEDQYEALRLGVFDHKHPYVPKERVGKDPLNPSTNRTIRASLEFQEFRILDSVANLRVRIGSRAKRELTEAEYDAAVEFLMDYADKEQPSWADVAEKIGVPGNRLVAPVLEDVQQKTAPYDRSSAAFEKAMGKKTEARQWWESTDDDQLRSLLIAFLVDATNDTEEAAAEAGLSELYKSWPAEEREALSNIDFEKGRVAYSQETLSKLSEYMHEYRVGLHEARKAVFGVDDTWRPPLDKLEEPTGQPAVDRVLTILRRFVLDCERQWGRPRAITVEHTRTGLMGPTQRQKILNEQKKNRADNERIRDELRESGVDNPSRAEVRRHLIVQEQECQCLYCGTMITTTTSELDHIVPRAGGGSSRRENLAAVCRACNAKKKRELFYAWAGPVKSQETIERVRQLKAFKDSKKAKMFKNQIRRLNQTEADEPIDERSLASTSYAAVAVRERLEQHFNEGLALDDKSRVVLDVYAGAVTRESRRAGGIDERILLRGERDKNRFDVRHHAVDAAVMTLLNRSVALTLEQRSQLRRAFYEQGLDKLDRDQLKPEGTSGSETPGTSESATPESMTDSQNDTDEYWMGEALKLAQKAWDEGEVPVGAILVRKGEVIGHGWNRSIGSHDPSAHAEIMAIREAGVRIGNYRMLDTVLYVTLEPCAMCAGALVHGRISRLVFGAENPKTGACGSVMDIARHPALNHQLQVDGGVMAAPCARLLSDFFRWRRAQKKAARDNSSGNSGSETPGTSESATPESGTEDWRNFIGLSLASQEKFLEWKKVTTVLGDLLAEAIEDDSIAVVSPLRLRPQNGRVHKDTIAAVKKQTLGSAWSADAVKRIVDPEIYLAMKDALGKSKVLPEDSARTLELSDGRYLEADDEVLFFPKNAASILTPRGVAEIGGSIHHARLYSWLTKKGELKIGMLRVYGAEFPWLMRESGSHDVLRMPIHPGSQSFRDMQDTTRKAVESSEAVEFAWITQNDELEFEPEDYIAHGGKDELRQFLEFMPECRWRVDGFKKNYQIRIRPAMLSREQLPSDIQRRLESKTLTENESLLLKALDTGLVVAIGGLLPLGTLKVIRRNNLGFPRWRGNGNLPTSFEVRSSALRALGVEGSGGKRPAATKKAGQAKKKK

SEQ ID NO: 1156 - protein, 1369 aa, unidentified
MAPKKKRKVGGGGSSTDMKNYRIGVAVGDRSVGLAAIEFDDDGLPIQKLALVTFRHDGGLDPTKNKTPMSRKETRGIARRTMRMNRERKRRLRNLDNVLENLGYSVPEGPEPETYEAWTSRALLASIKLASADELNEHLVRAVRHMARHRGWANPWWSLDQLEKASQEPSETFEIILARARELFGEKVPANPTLGMLGALAANNEVLLRPRDEKKRKTGYVRGTPLMFAQVRQGDQLAELRRICEVQGIEDQYEALRLGVFDHKHPYVPKERVGKDPLNPSTNRTIRASLEFQEFRILDSVANLRVRIGSRAKRELTEAEYDAAVEFLMDYADKEQPSWADVAEKIGVPGNRLVAPVLEDVQQKTAPYDRSSAAFEKAMGKKTEARQWWESTDDDQLRSLLIAFLVDATNDTEEAAAEAGLSELYKSWPAEEREALSNIDFEKGRVAYSQETLSKLSEYMHEYRVGLHEARKAVFGVDDTWRPPLDKLEEPTGQPAVDRVLTILRRFVLDCERQWGRPRAITVEHTRTGLMGPTQRQKILNEQKKNRADNERIRDELRESGVDNPSRAEVRRHLIVQEQECQCLYCGTMITTTTSELDHIVPRAGGGSSRRENLAAVCRACNAKKKRELFYAWAGPVKSQETIERVRQLKAFKDSKKAKMFKNQIRRLNQTEADEPIDERSLASTSYAAVAVRERLEQHFNEGLALDDKSRVVLDVYAGAVTRESRRAGGIDERILLRGERDKNRFDVRHHAVDAAVMTLLNRSVALTLEQRSQLRRAFYEQGLDKLDRDQLKPEEDWRNFGTSGSETPGTSESATPESMTDSQNDTDEYWMGEALKLAQKAWDEGEVPVGAILVRKGEVIGHGWNRSIGSHDPSAHAEIMAIREAGVRIGNYRMLDTVLYVTLEPCAMCAGALVHGRISRLVFGAENPKTGACGSVMDIARHPALNHQLQVDGGVMAAPCARLLSDFFRWRRAQKKAARDNSSGNSGSETPGTSESATPESGTIGLSLASQEKFLEWKKVTTVLGDLLAEAIEDDSIAVVSPLRLRPQNGRVHKDTIAAVKKQTLGSAWSADAVKRIVDPEIYLAMKDALGKSKVLPEDSARTLELSDGRYLEADDEVLFFPKNAASILTPRGVAEIGGSIHHARLYSWLTKKGELKIGMLRVYGAEFPWLMRESGSHDVLRMPIHPGSQSFRDMQDTTRKAVESSEAVEFAWITQNDELEFEPEDYIAHGGKDELRQFLEFMPECRWRVDGFKKNYQIRIRPAMLSREQLPSDIQRRLESKTLTENESLLLKALDTGLVVAIGGLLPLGTLKVIRRNNLGFPRWRGNGNLPTSFEVRSSALRALGVEGSGGKRPAATKKAGQAKKKK

SEQ ID NO: 1157 - protein, 1369 aa, unidentified
MAPKKKRKVGGGGSSTDMKNYRIGVAVGDRSVGLAAIEFDDDGLPIQKLALVTFRHDGGLDPTKNKTPMSRKETRGIARRTMRMNRERKRRLRNLDNVLENLGYSVPEGPEPETYEAWTSRALLASIKLASADELNEHLVRAVRHMARHRGWANPWWSLDQLEKASQEPSETFEIILARARELFGEKVPANPTLGMLGALAANNEVLLRPRDEKKRKTGYVRGTPLMFAQVRQGDQLAELRRICEVQGIEDQYEALRLGVFDHKHPYVPKERVGKDPLNPSTNRTIRASLEFQEFRILDSVANLRVRIGSRAKRELTEAEYDAAVEFLMDYADKEQPSWADVAEKIGVPGNRLVAPVLEDVQQKTAPYDRSSAAFEKAMGKKTEARQWWESTDDDQLRSLLIAFLVDATNDTEEAAAEAGLSELYKSWPAEEREALSNIDFEKGRVAYSQETLSKLSEYMHEYRVGLHEARKAVFGVDDTWRPPLDKLEEPTGQPAVDRVLTILRRFVLDCERQWGRPRAITVEHTRTGLMGPTQRQKILNEQKKNRADNERIRDELRESGVDNPSRAEVRRHLIVQEQECQCLYCGTMITTTTSELDHIVPRAGGGSSRRENLAAVCRACNAKKKRELFYAWAGPVKSQETIERVRQLKAFKDSKKAKMFKNQIRRLNQTEADEPIDERSLASTSYAAVAVRERLEQHFNEGLALDDKSRVVLDVYAGAVTRESRRAGGIDERILLRGERDKNRFDVRHHAVDAAVMTLLNRSVALTLEQRSQLRRAFYEQGLDKLDRDQLKPEEDWRNFIGLGTSGSETPGTSESATPESMTDSQNDTDEYWMGEALKLAQKAWDEGEVPVGAILVRKGEVIGHGWNRSIGSHDPSAHAEIMAIREAGVRIGNYRMLDTVLYVTLEPCAMCAGALVHGRISRLVFGAENPKTGACGSVMDIARHPALNHQLQVDGGVMAAPCARLLSDFFRWRRAQKKAARDNSSGNSGSETPGTSESATPESGTSLASQEKFLEWKKVTTVLGDLLAEAIEDDSIAVVSPLRLRPQNGRVHKDTIAAVKKQTLGSAWSADAVKRIVDPEIYLAMKDALGKSKVLPEDSARTLELSDGRYLEADDEVLFFPKNAASILTPRGVAEIGGSIHHARLYSWLTKKGELKIGMLRVYGAEFPWLMRESGSHDVLRMPIHPGSQSFRDMQDTTRKAVESSEAVEFAWITQNDELEFEPEDYIAHGGKDELRQFLEFMPECRWRVDGFKKNYQIRIRPAMLSREQLPSDIQRRLESKTLTENESLLLKALDTGLVVAIGGLLPLGTLKVIRRNNLGFPRWRGNGNLPTSFEVRSSALRALGVEGSGGKRPAATKKAGQAKKKK

SEQ ID NO: 1158 - protein, 1369 aa, unidentified
MAPKKKRKVGGGGSSTDMKNYRIGVAVGDRSVGLAAIEFDDDGLPIQKLALVTFRHDGGLDPTKNKTPMSRKETRGIARRTMRMNRERKRRLRNLDNVLENLGYSVPEGPEPETYEAWTSRALLASIKLASADELNEHLVRAVRHMARHRGWANPWWSLDQLEKASQEPSETFEIILARARELFGEKVPANPTLGMLGALAANNEVLLRPRDEKKRKTGYVRGTPLMFAQVRQGDQLAELRRICEVQGIEDQYEALRLGVFDHKHPYVPKERVGKDPLNPSTNRTIRASLEFQEFRILDSVANLRVRIGSRAKRELTEAEYDAAVEFLMDYADKEQPSWADVAEKIGVPGNRLVAPVLEDVQQKTAPYDRSSAAFEKAMGKKTEARQWWESTDDDQLRSLLIAFLVDATNDTEEAAAEAGLSELYKSWPAEEREALSNIDFEKGRVAYSQETLSKLSEYMHEYRVGLHEARKAVFGVDDTWRPPLDKLEEPTGQPAVDRVLTILRRFVLDCERQWGRPRAITVEHTRTGLMGPTQRQKILNEQKKNRADNERIRDELRESGVDNPSRAEVRRHLIVQEQECQCLYCGTMITTTTSELDHIVPRAGGGSSRRENLAAVCRACNAKKKRELFYAWAGPVKSQETIERVRQLKAFKDSKKAKMFKNQIRRLNQTEADEPIDERSLASTSYAAVAVRERLEQHFNEGLALDDKSRVVLDVYAGAVTRESRRAGGIDERILLRGERDKNRFDVRHHAVDAAVMTLLNRSVALTLEQRSQLRRAFYEQGLDKLDRDQLKPEEDWRNFIGLSLASQEKFLEWKKVTTVLGDLLAEAIEDDSIAVVSPLRLRPQNGRGTSGSETPGTSESATPESMTDSQNDTDEYWMGEALKLAQKAWDEGEVPVGAILVRKGEVIGHGWNRSIGSHDPSAHAEIMAIREAGVRIGNYRMLDTVLYVTLEPCAMCAGALVHGRISRLVFGAENPKTGACGSVMDIARHPALNHQLQVDGGVMAAPCARLLSDFFRWRRAQKKAARDNSSGNSGSETPGTSESATPESGTVHKDTIAAVKKQTLGSAWSADAVKRIVDPEIYLAMKDALGKSKVLPEDSARTLELSDGRYLEADDEVLFFPKNAASILTPRGVAEIGGSIHHARLYSWLTKKGELKIGMLRVYGAEFPWLMRESGSHDVLRMPIHPGSQSFRDMQDTTRKAVESSEAVEFAWITQNDELEFEPEDYIAHGGKDELRQFLEFMPECRWRVDGFKKNYQIRIRPAMLSREQLPSDIQRRLESKTLTENESLLLKALDTGLVVAIGGLLPLGTLKVIRRNNLGFPRWRGNGNLPTSFEVRSSALRALGVEGSGGKRPAATKKAGQAKKKK

SEQ ID NO: 1159 - protein, 1369 aa, unidentified
MAPKKKRKVGGGGSSTDMKNYRIGVAVGDRSVGLAAIEFDDDGLPIQKLALVTFRHDGGLDPTKNKTPMSRKETRGIARRTMRMNRERKRRLRNLDNVLENLGYSVPEGPEPETYEAWTSRALLASIKLASADELNEHLVRAVRHMARHRGWANPWWSLDQLEKASQEPSETFEIILARARELFGEKVPANPTLGMLGALAANNEVLLRPRDEKKRKTGYVRGTPLMFAQVRQGDQLAELRRICEVQGIEDQYEALRLGVFDHKHPYVPKERVGKDPLNPSTNRTIRASLEFQEFRILDSVANLRVRIGSRAKRELTEAEYDAAVEFLMDYADKEQPSWADVAEKIGVPGNRLVAPVLEDVQQKTAPYDRSSAAFEKAMGKKTEARQWWESTDDDQLRSLLIAFLVDATNDTEEAAAEAGLSELYKSWPAEEREALSNIDFEKGRVAYSQETLSKLSEYMHEYRVGLHEARKAVFGVDDTWRPPLDKLEEPTGQPAVDRVLTILRRFVLDCERQWGRPRAITVEHTRTGLMGPTQRQKILNEQKKNRADNERIRDELRESGVDNPSRAEVRRHLIVQEQECQCLYCGTMITTTTSELDHIVPRAGGGSSRRENLAAVCRACNAKKKRELFYAWAGPVKSQETIERVRQLKAFKDSKKAKMFKNQIRRLNQTEADEPIDERSLASTSYAAVAVRERLEQHFNEGLALDDKSRVVLDVYAGAVTRESRRAGGIDERILLRGERDKNRFDVRHHAVDAAVMTLLNRSVALTLEQRSQLRRAFYEQGLDKLDRDQLKPEEDWRNFIGLSLASQEKFLEWKKVTTVLGDLLAEAIEDDSIAVVSPLRLRPQNGRVHKDTIAAVKKQTLGSAWSADAVKRIVDPEGTSGSETPGTSESATPESMTDSQNDTDEYWMGEALKLAQKAWDEGEVPVGAILVRKGEVIGHGWNRSIGSHDPSAHAEIMAIREAGVRIGNYRMLDTVLYVTLEPCAMCAGALVHGRISRLVFGAENPKTGACGSVMDIARHPALNHQLQVDGGVMAAPCARLLSDFFRWRRAQKKAARDNSSGNSGSETPGTSESATPESGTIYLAMKDALGKSKVLPEDSARTLELSDGRYLEADDEVLFFPKNAASILTPRGVAEIGGSIHHARLYSWLTKKGELKIGMLRVYGAEFPWLMRESGSHDVLRMPIHPGSQSFRDMQDTTRKAVESSEAVEFAWITQNDELEFEPEDYIAHGGKDELRQFLEFMPECRWRVDGFKKNYQIRIRPAMLSREQLPSDIQRRLESKTLTENESLLLKALDTGLVVAIGGLLPLGTLKVIRRNNLGFPRWRGNGNLPTSFEVRSSALRALGVEGSGGKRPAATKKAGQAKKKK

SEQ ID NO: 1160 - protein, 1369 aa, unidentified
MAPKKKRKVGGGGSSTDMKNYRIGVAVGDRSVGLAAIEFDDDGLPIQKLALVTFRHDGGLDPTKNKTPMSRKETRGIARRTMRMNRERKRRLRNLDNVLENLGYSVPEGPEPETYEAWTSRALLASIKLASADELNEHLVRAVRHMARHRGWANPWWSLDQLEKASQEPSETFEIILARARELFGEKVPANPTLGMLGALAANNEVLLRPRDEKKRKTGYVRGTPLMFAQVRQGDQLAELRRICEVQGIEDQYEALRLGVFDHKHPYVPKERVGKDPLNPSTNRTIRASLEFQEFRILDSVANLRVRIGSRAKRELTEAEYDAAVEFLMDYADKEQPSWADVAEKIGVPGNRLVAPVLEDVQQKTAPYDRSSAAFEKAMGKKTEARQWWESTDDDQLRSLLIAFLVDATNDTEEAAAEAGLSELYKSWPAEEREALSNIDFEKGRVAYSQETLSKLSEYMHEYRVGLHEARKAVFGVDDTWRPPLDKLEEPTGQPAVDRVLTILRRFVLDCERQWGRPRAITVEHTRTGLMGPTQRQKILNEQKKNRADNERIRDELRESGVDNPSRAEVRRHLIVQEQECQCLYCGTMITTTTSELDHIVPRAGGGSSRRENLAAVCRACNAKKKRELFYAWAGPVKSQETIERVRQLKAFKDSKKAKMFKNQIRRLNQTEADEPIDERSLASTSYAAVAVRERLEQHFNEGLALDDKSRVVLDVYAGAVTRESRRAGGIDERILLRGERDKNRFDVRHHAVDAAVMTLLNRSVALTLEQRSQLRRAFYEQGLDKLDRDQLKPEEDWRNFIGLSLASQEKFLEWKKVTTVLGDLLAEAIEDDSIAVVSPLRLRPQNGRVHKDTIAAVKKQTLGSAWSADAVKRIVDPEIYLAMKDALGKSKVLPEDSARGTSGSETPGTSESATPESMTDSQNDTDEYWMGEALKLAQKAWDEGEVPVGAILVRKGEVIGHGWNRSIGSHDPSAHAEIMAIREAGVRIGNYRMLDTVLYVTLEPCAMCAGALVHGRISRLVFGAENPKTGACGSVMDIARHPALNHQLQVDGGVMAAPCARLLSDFFRWRRAQKKAARDNSSGNSGSETPGTSESATPESGTTLELSDGRYLEADDEVLFFPKNAASILTPRGVAEIGGSIHHARLYSWLTKKGELKIGMLRVYGAEFPWLMRESGSHDVLRMPIHPGSQSFRDMQDTTRKAVESSEAVEFAWITQNDELEFEPEDYIAHGGKDELRQFLEFMPECRWRVDGFKKNYQIRIRPAMLSREQLPSDIQRRLESKTLTENESLLLKALDTGLVVAIGGLLPLGTLKVIRRNNLGFPRWRGNGNLPTSFEVRSSALRALGVEGSGGKRPAATKKAGQAKKKK

SEQ ID NO: 1161 - protein, 972 aa, unidentified
MTDSQNDTDEYWMGEALKLAQKARDEGEVPVGAILVRKGEVIGHGWNRSIGSHDPSAHAEIMAIREAGVRIGNYRMLDTVLYVTLEPCAMCAGALVHGRISRLVFGAEDPKTGACGSVMDIARHPALNHQLQVDGGVMAAPCARLLSDFFRWRRAQKKAARDNSSGNGTSGGSSGGSSGSETPGTSESATPESSGGSSGGSMERELVLGIAYGGKYTGLAVVDRRHNQVLYANRLKMRDDVAGILKDRRKQRGIRRTAQTKKKRLRELKNYLKSIGYNESTATFETVYSLAHKRGYDYADMPEEKTSEEIEAMDVEERKQWEKEKQEWEETKRNSRHRKEVVKDVHKAMIEGRATEEQIKRVERIFNKQYRPKRFNNRILTKCKVEDCGVNTPLRKNVRDLLIENIVRFFPIEQSEKDNLKDAVLDKNRREEVKSFFRKHKTDEHIRKQVYDIADNKLSGRTVFCKEHILEHTEHSKEERKVFRLAPSLKTKIENVLAVIKDEILPKFTVNKVVMESNNFDIAAKTQGKKRLAKEEYGKGPREGKETRKEALLRETDGRCIYCGKSIDISNAHDDHIFPRKAGGLNIFANLVACCAVCNENKKGRTPLESGISPKPEIIAFMKNDLKKKILEDARNINTVDFNKYMSHASIGWRYMRDRLRESAGNKKLPIERQSGIYTAYFRRWWGFKKERGNTLHHALDAVILASRKGYSDDGLVDMTLKPKYNKGGEFDPEKHLPEPIEFKMDKGSRGSALHDRNPLSYKKGIITRRFMVTEIECGKEDDVISETYREKLKEAFKRFDTKKGKCLTDKEAKEAGFCIKKNELVMSLKCSIKGTGPGQMIRINNNVFKTNVHNVGVDVYLDEKGKKKAYERKNPRLSKHFIEPPPQPNGRVSFTLKRRDMVTVEGEDAIYRIKKLGTSPTIEAVVGSDGKTRTVSATKLTKANSAELEEGADKRTADGSEFESPKKKRKV

SEQ ID NO: 1162 - protein, 972 aa, unidentified
MTDSQNDTDEYWMGEALKLAQKARDEGEVPVGAILVRKGEVIGHGWNRSIGSHDPSAHAEIMAIREAGVRIGNYRMLDTVLYVTLEPCAMCAGALVHGRISRLVFGAENPKTGACGSVMDIARHPALNHQLQVDGGVMAAPCARLLSDFFRWRRAQKKAARDNSSGNGTSGGSSGGSSGSETPGTSESATPESSGGSSGGSMERELVLGIAYGGKYTGLAVVDRRHNQVLYANRLKMRDDVAGILKDRRKQRGIRRTAQTKKKRLRELKNYLKSIGYNESTATFETVYSLAHKRGYDYADMPEEKTSEEIEAMDVEERKQWEKEKQEWEETKRNSRHRKEVVKDVHKAMIEGRATEEQIKRVERIFNKQYRPKRFNNRILTKCKVEDCGVNTPLRKNVRDLLIENIVRFFPIEQSEKDNLKDAVLDKNRREEVKSFFRKHKTDEHIRKQVYDIADNKLSGRTVFCKEHILEHTEHSKEERKVFRLAPSLKTKIENVLAVIKDEILPKFTVNKVVMESNNFDIAAKTQGKKRLAKEEYGKGPREGKETRKEALLRETDGRCIYCGKSIDISNAHDDHIFPRKAGGLNIFANLVACCAVCNENKKGRTPLESGISPKPEIIAFMKNDLKKKILEDARNINTVDFNKYMSHASIGWRYMRDRLRESAGNKKLPIERQSGIYTAYFRRWWGFKKERGNTLHHALDAVILASRKGYSDDGLVDMTLKPKYNKGGEFDPEKHLPEPIEFKMDKGSRGSALHDRNPLSYKKGIITRRFMVTEIECGKEDDVISETYREKLKEAFKRFDTKKGKCLTDKEAKEAGFCIKKNELVMSLKCSIKGTGPGQMIRINNNVFKTNVHNVGVDVYLDEKGKKKAYERKNPRLSKHFIEPPPQPNGRVSFTLKRRDMVTVEGEDAIYRIKKLGTSPTIEAVVGSDGKTRTVSATKLTKANSAELEEGADKRTADGSEFESPKKKRKV

SEQ ID NO: 1163 - protein, 972 aa, unidentified
MTDSQNDTDEYWMGEALKLAQKAWDEGEVPVGAILVLKGEVIGHGWNRSIGSHDPSAHAEIMAIREAGVRIGNYRMLDTVLYVTLEPCAMCAGALVHGRISRLVFGAENPKTGACGSVMDIARHPALNHQLQVDGGVMAAPCARLLSDFFRWRRAQKKAARDNSSGNGTSGGSSGGSSGSETPGTSESATPESSGGSSGGSMERELVLGIAYGGKYTGLAVVDRRHNQVLYANRLKMRDDVAGILKDRRKQRGIRRTAQTKKKRLRELKNYLKSIGYNESTATFETVYSLAHKRGYDYADMPEEKTSEEIEAMDVEERKQWEKEKQEWEETKRNSRHRKEVVKDVHKAMIEGRATEEQIKRVERIFNKQYRPKRFNNRILTKCKVEDCGVNTPLRKNVRDLLIENIVRFFPIEQSEKDNLKDAVLDKNRREEVKSFFRKHKTDEHIRKQVYDIADNKLSGRTVFCKEHILEHTEHSKEERKVFRLAPSLKTKIENVLAVIKDEILPKFTVNKVVMESNNFDIAAKTQGKKRLAKEEYGKGPREGKETRKEALLRETDGRCIYCGKSIDISNAHDDHIFPRKAGGLNIFANLVACCAVCNENKKGRTPLESGISPKPEIIAFMKNDLKKKILEDARNINTVDFNKYMSHASIGWRYMRDRLRESAGNKKLPIERQSGIYTAYFRRWWGFKKERGNTLHHALDAVILASRKGYSDDGLVDMTLKPKYNKGGEFDPEKHLPEPIEFKMDKGSRGSALHDRNPLSYKKGIITRRFMVTEIECGKEDDVISETYREKLKEAFKRFDTKKGKCLTDKEAKEAGFCIKKNELVMSLKCSIKGTGPGQMIRINNNVFKTNVHNVGVDVYLDEKGKKKAYERKNPRLSKHFIEPPPQPNGRVSFTLKRRDMVTVEGEDAIYRIKKLGTSPTIEAVVGSDGKTRTVSATKLTKANSAELEEGADKRTADGSEFESPKKKRKV

SEQ ID NO: 1164 - protein, 972 aa, unidentified
MTDSQNDTDEYWMGEALKLAQKAWDEGEVPVGAILVRKGEVIGHGWNRAIGSHDPSAHAEIMAIREAGVRIGNYRMLDTVLYVTLEPCAMCAGALVHGRISRLVFGAENPKTGACGSVMDIARHPALNHQLQVDGGVMAAPCARLLSDFFRWRRAQKKAARDNSSGNGTSGGSSGGSSGSETPGTSESATPESSGGSSGGSMERELVLGIAYGGKYTGLAVVDRRHNQVLYANRLKMRDDVAGILKDRRKQRGIRRTAQTKKKRLRELKNYLKSIGYNESTATFETVYSLAHKRGYDYADMPEEKTSEEIEAMDVEERKQWEKEKQEWEETKRNSRHRKEVVKDVHKAMIEGRATEEQIKRVERIFNKQYRPKRFNNRILTKCKVEDCGVNTPLRKNVRDLLIENIVRFFPIEQSEKDNLKDAVLDKNRREEVKSFFRKHKTDEHIRKQVYDIADNKLSGRTVFCKEHILEHTEHSKEERKVFRLAPSLKTKIENVLAVIKDEILPKFTVNKVVMESNNFDIAAKTQGKKRLAKEEYGKGPREGKETRKEALLRETDGRCIYCGKSIDISNAHDDHIFPRKAGGLNIFANLVACCAVCNENKKGRTPLESGISPKPEIIAFMKNDLKKKILEDARNINTVDFNKYMSHASIGWRYMRDRLRESAGNKKLPIERQSGIYTAYFRRWWGFKKERGNTLHHALDAVILASRKGYSDDGLVDMTLKPKYNKGGEFDPEKHLPEPIEFKMDKGSRGSALHDRNPLSYKKGIITRRFMVTEIECGKEDDVISETYREKLKEAFKRFDTKKGKCLTDKEAKEAGFCIKKNELVMSLKCSIKGTGPGQMIRINNNVFKTNVHNVGVDVYLDEKGKKKAYERKNPRLSKHFIEPPPQPNGRVSFTLKRRDMVTVEGEDAIYRIKKLGTSPTIEAVVGSDGKTRTVSATKLTKANSAELEEGADKRTADGSEFESPKKKRKV

SEQ ID NO: 1165 - protein, 972 aa, unidentified
MTDSQNDTDEYWMGEALKLAQKAWDEGEVPVGAILVRKGEVIGHGWNRSIGLHDPSAHAEIMAIREAGVRIGNYRMLDTVLYVTLEPCAMCAGALVHGRISRLVFGAENPKTGACGSVMDIARHPALNHQLQVDGGVMAAPCARLLSDFFRWRRAQKKAARDNSSGNGTSGGSSGGSSGSETPGTSESATPESSGGSSGGSMERELVLGIAYGGKYTGLAVVDRRHNQVLYANRLKMRDDVAGILKDRRKQRGIRRTAQTKKKRLRELKNYLKSIGYNESTATFETVYSLAHKRGYDYADMPEEKTSEEIEAMDVEERKQWEKEKQEWEETKRNSRHRKEVVKDVHKAMIEGRATEEQIKRVERIFNKQYRPKRFNNRILTKCKVEDCGVNTPLRKNVRDLLIENIVRFFPIEQSEKDNLKDAVLDKNRREEVKSFFRKHKTDEHIRKQVYDIADNKLSGRTVFCKEHILEHTEHSKEERKVFRLAPSLKTKIENVLAVIKDEILPKFTVNKVVMESNNFDIAAKTQGKKRLAKEEYGKGPREGKETRKEALLRETDGRCIYCGKSIDISNAHDDHIFPRKAGGLNIFANLVACCAVCNENKKGRTPLESGISPKPEIIAFMKNDLKKKILEDARNINTVDFNKYMSHASIGWRYMRDRLRESAGNKKLPIERQSGIYTAYFRRWWGFKKERGNTLHHALDAVILASRKGYSDDGLVDMTLKPKYNKGGEFDPEKHLPEPIEFKMDKGSRGSALHDRNPLSYKKGIITRRFMVTEIECGKEDDVISETYREKLKEAFKRFDTKKGKCLTDKEAKEAGFCIKKNELVMSLKCSIKGTGPGQMIRINNNVFKTNVHNVGVDVYLDEKGKKKAYERKNPRLSKHFIEPPPQPNGRVSFTLKRRDMVTVEGEDAIYRIKKLGTSPTIEAVVGSDGKTRTVSATKLTKANSAELEEGADKRTADGSEFESPKKKRKV

SEQ ID NO: 1166 - protein, 972 aa, unidentified
MTDSQNDTDEYWMGEALKLAQKAWDEGEVPVGAILVRKGEVIGHGWNRSIGSHDPSAHAEIMAIREAGVRIGNYRMLDTVLYSTLEPCAMCAGALVHGRISRLVFGAENPKTGACGSVMDIARHPALNHQLQVDGGVMAAPCARLLSDFFRWRRAQKKAARDNSSGNGTSGGSSGGSSGSETPGTSESATPESSGGSSGGSMERELVLGIAYGGKYTGLAVVDRRHNQVLYANRLKMRDDVAGILKDRRKQRGIRRTAQTKKKRLRELKNYLKSIGYNESTATFETVYSLAHKRGYDYADMPEEKTSEEIEAMDVEERKQWEKEKQEWEETKRNSRHRKEVVKDVHKAMIEGRATEEQIKRVERIFNKQYRPKRFNNRILTKCKVEDCGVNTPLRKNVRDLLIENIVRFFPIEQSEKDNLKDAVLDKNRREEVKSFFRKHKTDEHIRKQVYDIADNKLSGRTVFCKEHILEHTEHSKEERKVFRLAPSLKTKIENVLAVIKDEILPKFTVNKVVMESNNFDIAAKTQGKKRLAKEEYGKGPREGKETRKEALLRETDGRCIYCGKSIDISNAHDDHIFPRKAGGLNIFANLVACCAVCNENKKGRTPLESGISPKPEIIAFMKNDLKKKILEDARNINTVDFNKYMSHASIGWRYMRDRLRESAGNKKLPIERQSGIYTAYFRRWWGFKKERGNTLHHALDAVILASRKGYSDDGLVDMTLKPKYNKGGEFDPEKHLPEPIEFKMDKGSRGSALHDRNPLSYKKGIITRRFMVTEIECGKEDDVISETYREKLKEAFKRFDTKKGKCLTDKEAKEAGFCIKKNELVMSLKCSIKGTGPGQMIRINNNVFKTNVHNVGVDVYLDEKGKKKAYERKNPRLSKHFIEPPPQPNGRVSFTLKRRDMVTVEGEDAIYRIKKLGTSPTIEAVVGSDGKTRTVSATKLTKANSAELEEGADKRTADGSEFESPKKKRKV

SEQ ID NO: 1167 - protein, 972 aa, unidentified
MTDSQNDTDEYWMGEALKLAQKAWDEGEVPVGAILVRKGEVIGHGWNRSIGSHDPSAHAEIMAIREAGVRIGNYRMLDTVLYVTFEPCAMCAGALVHGRISRLVFGAENPKTGACGSVMDIARHPALNHQLQVDGGVMAAPCARLLSDFFRWRRAQKKAARDNSSGNGTSGGSSGGSSGSETPGTSESATPESSGGSSGGSMERELVLGIAYGGKYTGLAVVDRRHNQVLYANRLKMRDDVAGILKDRRKQRGIRRTAQTKKKRLRELKNYLKSIGYNESTATFETVYSLAHKRGYDYADMPEEKTSEEIEAMDVEERKQWEKEKQEWEETKRNSRHRKEVVKDVHKAMIEGRATEEQIKRVERIFNKQYRPKRFNNRILTKCKVEDCGVNTPLRKNVRDLLIENIVRFFPIEQSEKDNLKDAVLDKNRREEVKSFFRKHKTDEHIRKQVYDIADNKLSGRTVFCKEHILEHTEHSKEERKVFRLAPSLKTKIENVLAVIKDEILPKFTVNKVVMESNNFDIAAKTQGKKRLAKEEYGKGPREGKETRKEALLRETDGRCIYCGKSIDISNAHDDHIFPRKAGGLNIFANLVACCAVCNENKKGRTPLESGISPKPEIIAFMKNDLKKKILEDARNINTVDFNKYMSHASIGWRYMRDRLRESAGNKKLPIERQSGIYTAYFRRWWGFKKERGNTLHHALDAVILASRKGYSDDGLVDMTLKPKYNKGGEFDPEKHLPEPIEFKMDKGSRGSALHDRNPLSYKKGIITRRFMVTEIECGKEDDVISETYREKLKEAFKRFDTKKGKCLTDKEAKEAGFCIKKNELVMSLKCSIKGTGPGQMIRINNNVFKTNVHNVGVDVYLDEKGKKKAYERKNPRLSKHFIEPPPQPNGRVSFTLKRRDMVTVEGEDAIYRIKKLGTSPTIEAVVGSDGKTRTVSATKLTKANSAELEEGADKRTADGSEFESPKKKRKV

SEQ ID NO: 1168 - protein, 972 aa, unidentified; identical to SEQ ID NO: 840

SEQ ID NO: 1169 - protein, 972 aa, unidentified
MTDSQNDTDEYWMGEALKLAQKAWDEGEVPVGAILVRKGEVIGHGWNRSIGSHDPSAHAEIMAIREAGVRIGNYRMLDTVLYVTLEPCAMCAGALVHGRISRLVFGAENSKTGACGSVMDIARHPALNHQLQVDGGVMAAPCARLLSDFFRWRRAQKKAARDNSSGNGTSGGSSGGSSGSETPGTSESATPESSGGSSGGSMERELVLGIAYGGKYTGLAVVDRRHNQVLYANRLKMRDDVAGILKDRRKQRGIRRTAQTKKKRLRELKNYLKSIGYNESTATFETVYSLAHKRGYDYADMPEEKTSEEIEAMDVEERKQWEKEKQEWEETKRNSRHRKEVVKDVHKAMIEGRATEEQIKRVERIFNKQYRPKRFNNRILTKCKVEDCGVNTPLRKNVRDLLIENIVRFFPIEQSEKDNLKDAVLDKNRREEVKSFFRKHKTDEHIRKQVYDIADNKLSGRTVFCKEHILEHTEHSKEERKVFRLAPSLKTKIENVLAVIKDEILPKFTVNKVVMESNNFDIAAKTQGKKRLAKEEYGKGPREGKETRKEALLRETDGRCIYCGKSIDISNAHDDHIFPRKAGGLNIFANLVACCAVCNENKKGRTPLESGISPKPEIIAFMKNDLKKKILEDARNINTVDFNKYMSHASIGWRYMRDRLRESAGNKKLPIERQSGIYTAYFRRWWGFKKERGNTLHHALDAVILASRKGYSDDGLVDMTLKPKYNKGGEFDPEKHLPEPIEFKMDKGSRGSALHDRNPLSYKKGIITRRFMVTEIECGKEDDVISETYREKLKEAFKRFDTKKGKCLTDKEAKEAGFCIKKNELVMSLKCSIKGTGPGQMIRINNNVFKTNVHNVGVDVYLDEKGKKKAYERKNPRLSKHFIEPPPQPNGRVSFTLKRRDMVTVEGEDAIYRIKKLGTSPTIEAVVGSDGKTRTVSATKLTKANSAELEEGADKRTADGSEFESPKKKRKV

SEQ ID NO: 1170 - protein, 972 aa, unidentified
MTDSQNDTDEYWMGEALKLAQKAWDEGEVPVGAILVRKGEVIGHGWNRSIGSHDPSAHAEIMAIREAGVRIGNYRMLDTVLYVTLEPCAMCAGALVHGRISRLVFGAENPKRGACGSVMDIARHPALNHQLQVDGGVMAAPCARLLSDFFRWRRAQKKAARDNSSGNGTSGGSSGGSSGSETPGTSESATPESSGGSSGGSMERELVLGIAYGGKYTGLAVVDRRHNQVLYANRLKMRDDVAGILKDRRKQRGIRRTAQTKKKRLRELKNYLKSIGYNESTATFETVYSLAHKRGYDYADMPEEKTSEEIEAMDVEERKQWEKEKQEWEETKRNSRHRKEVVKDVHKAMIEGRATEEQIKRVERIFNKQYRPKRFNNRILTKCKVEDCGVNTPLRKNVRDLLIENIVRFFPIEQSEKDNLKDAVLDKNRREEVKSFFRKHKTDEHIRKQVYDIADNKLSGRTVFCKEHILEHTEHSKEERKVFRLAPSLKTKIENVLAVIKDEILPKFTVNKVVMESNNFDIAAKTQGKKRLAKEEYGKGPREGKETRKEALLRETDGRCIYCGKSIDISNAHDDHIFPRKAGGLNIFANLVACCAVCNENKKGRTPLESGISPKPEIIAFMKNDLKKKILEDARNINTVDFNKYMSHASIGWRYMRDRLRESAGNKKLPIERQSGIYTAYFRRWWGFKKERGNTLHHALDAVILASRKGYSDDGLVDMTLKPKYNKGGEFDPEKHLPEPIEFKMDKGSRGSALHDRNPLSYKKGIITRRFMVTEIECGKEDDVISETYREKLKEAFKRFDTKKGKCLTDKEAKEAGFCIKKNELVMSLKCSIKGTGPGQMIRINNNVFKTNVHNVGVDVYLDEKGKKKAYERKNPRLSKHFIEPPPQPNGRVSFTLKRRDMVTVEGEDAIYRIKKLGTSPTIEAVVGSDGKTRTVSATKLTKANSAELEEGADKRTADGSEFESPKKKRKV

SEQ ID NO: 1171 - protein, 972 aa, unidentified
MTDSQNDTDEYWMGEALKLAQKAWDEGEVPVGAILVRKGEVIGHGWNRSIGSHDPSAHAEIMAIREAGVRIGNYRMLDTVLYVTLEPCAMCAGALVHGRISRLVFGAENPKTGACGSVMNIARHPALNHQLQVDGGVMAAPCARLLSDFFRWRRAQKKAARDNSSGNGTSGGSSGGSSGSETPGTSESATPESSGGSSGGSMERELVLGIAYGGKYTGLAVVDRRHNQVLYANRLKMRDDVAGILKDRRKQRGIRRTAQTKKKRLRELKNYLKSIGYNESTATFETVYSLAHKRGYDYADMPEEKTSEEIEAMDVEERKQWEKEKQEWEETKRNSRHRKEVVKDVHKAMIEGRATEEQIKRVERIFNKQYRPKRFNNRILTKCKVEDCGVNTPLRKNVRDLLIENIVRFFPIEQSEKDNLKDAVLDKNRREEVKSFFRKHKTDEHIRKQVYDIADNKLSGRTVFCKEHILEHTEHSKEERKVFRLAPSLKTKIENVLAVIKDEILPKFTVNKVVMESNNFDIAAKTQGKKRLAKEEYGKGPREGKETRKEALLRETDGRCIYCGKSIDISNAHDDHIFPRKAGGLNIFANLVACCAVCNENKKGRTPLESGISPKPEIIAFMKNDLKKKILEDARNINTVDFNKYMSHASIGWRYMRDRLRESAGNKKLPIERQSGIYTAYFRRWWGFKKERGNTLHHALDAVILASRKGYSDDGLVDMTLKPKYNKGGEFDPEKHLPEPIEFKMDKGSRGSALHDRNPLSYKKGIITRRFMVTEIECGKEDDVISETYREKLKEAFKRFDTKKGKCLTDKEAKEAGFCIKKNELVMSLKCSIKGTGPGQMIRINNNVFKTNVHNVGVDVYLDEKGKKKAYERKNPRLSKHFIEPPPQPNGRVSFTLKRRDMVTVEGEDAIYRIKKLGTSPTIEAVVGSDGKTRTVSATKLTKANSAELEEGADKRTADGSEFESPKKKRKV

SEQ ID NO: 1172 - protein, 972 aa, unidentified
MTDSQNDTDEYWMGEALKLAQKAWDEGEVPVGAILVRKGEVIGHGWNRSIGSHDPSAHAEIMAIREAGVRIGNYRMLDTVLYVTLEPCAMCAGALVHGRISRLVFGAENPKTGACGSVMDIANHPALNHQLQVDGGVMAAPCARLLSDFFRWRRAQKKAARDNSSGNGTSGGSSGGSSGSETPGTSESATPESSGGSSGGSMERELVLGIAYGGKYTGLAVVDRRHNQVLYANRLKMRDDVAGILKDRRKQRGIRRTAQTKKKRLRELKNYLKSIGYNESTATFETVYSLAHKRGYDYADMPEEKTSEEIEAMDVEERKQWEKEKQEWEETKRNSRHRKEVVKDVHKAMIEGRATEEQIKRVERIFNKQYRPKRFNNRILTKCKVEDCGVNTPLRKNVRDLLIENIVRFFPIEQSEKDNLKDAVLDKNRREEVKSFFRKHKTDEHIRKQVYDIADNKLSGRTVFCKEHILEHTEHSKEERKVFRLAPSLKTKIENVLAVIKDEILPKFTVNKVVMESNNFDIAAKTQGKKRLAKEEYGKGPREGKETRKEALLRETDGRCIYCGKSIDISNAHDDHIFPRKAGGLNIFANLVACCAVCNENKKGRTPLESGISPKPEIIAFMKNDLKKKILEDARNINTVDFNKYMSHASIGWRYMRDRLRESAGNKKLPIERQSGIYTAYFRRWWGFKKERGNTLHHALDAVILASRKGYSDDGLVDMTLKPKYNKGGEFDPEKHLPEPIEFKMDKGSRGSALHDRNPLSYKKGIITRRFMVTEIECGKEDDVISETYREKLKEAFKRFDTKKGKCLTDKEAKEAGFCIKKNELVMSLKCSIKGTGPGQMIRINNNVFKTNVHNVGVDVYLDEKGKKKAYERKNPRLSKHFIEPPPQPNGRVSFTLKRRDMVTVEGEDAIYRIKKLGTSPTIEAVVGSDGKTRTVSATKLTKANSAELEEGADKRTADGSEFESPKKKRKV

SEQ ID NO: 1173 - protein, 972 aa, unidentified; identical to SEQ ID NO: 851

SEQ ID NO: 1174 - protein, 972 aa, unidentified
MTDSQNDTDEYWMGEALKLAQKAWDEGEVPVGAILVRKGEVIGHGWNRSIGSHDPSAHAEIMAIREAGVRIGNYRMLDTVLYVTLEPCAMCAGALVHGRISRLVFGAENPKTGACGSVMDIARHPALNHQLQVDGGVMAAPCARLLCDFFRWRRAQKKAARDNSSGNGTSGGSSGGSSGSETPGTSESATPESSGGSSGGSMERELVLGIAYGGKYTGLAVVDRRHNQVLYANRLKMRDDVAGILKDRRKQRGIRRTAQTKKKRLRELKNYLKSIGYNESTATFETVYSLAHKRGYDYADMPEEKTSEEIEAMDVEERKQWEKEKQEWEETKRNSRHRKEVVKDVHKAMIEGRATEEQIKRVERIFNKQYRPKRFNNRILTKCKVEDCGVNTPLRKNVRDLLIENIVRFFPIEQSEKDNLKDAVLDKNRREEVKSFFRKHKTDEHIRKQVYDIADNKLSGRTVFCKEHILEHTEHSKEERKVFRLAPSLKTKIENVLAVIKDEILPKFTVNKVVMESNNFDIAAKTQGKKRLAKEEYGKGPREGKETRKEALLRETDGRCIYCGKSIDISNAHDDHIFPRKAGGLNIFANLVACCAVCNENKKGRTPLESGISPKPEIIAFMKNDLKKKILEDARNINTVDFNKYMSHASIGWRYMRDRLRESAGNKKLPIERQSGIYTAYFRRWWGFKKERGNTLHHALDAVILASRKGYSDDGLVDMTLKPKYNKGGEFDPEKHLPEPIEFKMDKGSRGSALHDRNPLSYKKGIITRRFMVTEIECGKEDDVISETYREKLKEAFKRFDTKKGKCLTDKEAKEAGFCIKKNELVMSLKCSIKGTGPGQMIRINNNVFKTNVHNVGVDVYLDEKGKKKAYERKNPRLSKHFIEPPPQPNGRVSFTLKRRDMVTVEGEDAIYRIKKLGTSPTIEAVVGSDGKTRTVSATKLTKANSAELEEGADKRTADGSEFESPKKKRKV

SEQ ID NO: 1175 - protein, 972 aa, unidentified
MTDSQNDTDEYWMGEALKLAQKAWDEGEVPVGAILVRKGEVIGHGWNRSIGSHDPSAHAEIMAIREAGVRIGNYRMLDTVLYVTLEPCAMCAGALVHGRISRLVFGAENPKTGACGSVMDIARHPALNHQLQVDGGVMAAPCARLLSYFFRWRRAQKKAARDNSSGNGTSGGSSGGSSGSETPGTSESATPESSGGSSGGSMERELVLGIAYGGKYTGLAVVDRRHNQVLYANRLKMRDDVAGILKDRRKQRGIRRTAQTKKKRLRELKNYLKSIGYNESTATFETVYSLAHKRGYDYADMPEEKTSEEIEAMDVEERKQWEKEKQEWEETKRNSRHRKEVVKDVHKAMIEGRATEEQIKRVERIFNKQYRPKRFNNRILTKCKVEDCGVNTPLRKNVRDLLIENIVRFFPIEQSEKDNLKDAVLDKNRREEVKSFFRKHKTDEHIRKQVYDIADNKLSGRTVFCKEHILEHTEHSKEERKVFRLAPSLKTKIENVLAVIKDEILPKFTVNKVVMESNNFDIAAKTQGKKRLAKEEYGKGPREGKETRKEALLRETDGRCIYCGKSIDISNAHDDHIFPRKAGGLNIFANLVACCAVCNENKKGRTPLESGISPKPEIIAFMKNDLKKKILEDARNINTVDFNKYMSHASIGWRYMRDRLRESAGNKKLPIERQSGIYTAYFRRWWGFKKERGNTLHHALDAVILASRKGYSDDGLVDMTLKPKYNKGGEFDPEKHLPEPIEFKMDKGSRGSALHDRNPLSYKKGIITRRFMVTEIECGKEDDVISETYREKLKEAFKRFDTKKGKCLTDKEAKEAGFCIKKNELVMSLKCSIKGTGPGQMIRINNNVFKTNVHNVGVDVYLDEKGKKKAYERKNPRLSKHFIEPPPQPNGRVSFTLKRRDMVTVEGEDAIYRIKKLGTSPTIEAVVGSDGKTRTVSATKLTKANSAELEEGADKRTADGSEFESPKKKRKV

SEQ ID NO: 1176 - protein, 972 aa, unidentified
MTDSQNDTDEYWMGEALKLAQKAWDEGEVPVGAILVRKGEVIGHGWNRSIGSHDPSAHAEIMAIREAGVRIGNYRMLDTVLYVTLEPCAMCAGALVHGRISRLVFGAENPKTGACGSVMDIARHPALNHQLQVDGGVMAAPCARLLSRFFRWRRAQKKAARDNSSGNGTSGGSSGGSSGSETPGTSESATPESSGGSSGGSMERELVLGIAYGGKYTGLAVVDRRHNQVLYANRLKMRDDVAGILKDRRKQRGIRRTAQTKKKRLRELKNYLKSIGYNESTATFETVYSLAHKRGYDYADMPEEKTSEEIEAMDVEERKQWEKEKQEWEETKRNSRHRKEVVKDVHKAMIEGRATEEQIKRVERIFNKQYRPKRFNNRILTKCKVEDCGVNTPLRKNVRDLLIENIVRFFPIEQSEKDNLKDAVLDKNRREEVKSFFRKHKTDEHIRKQVYDIADNKLSGRTVFCKEHILEHTEHSKEERKVFRLAPSLKTKIENVLAVIKDEILPKFTVNKVVMESNNFDIAAKTQGKKRLAKEEYGKGPREGKETRKEALLRETDGRCIYCGKSIDISNAHDDHIFPRKAGGLNIFANLVACCAVCNENKKGRTPLESGISPKPEIIAFMKNDLKKKILEDARNINTVDFNKYMSHASIGWRYMRDRLRESAGNKKLPIERQSGIYTAYFRRWWGFKKERGNTLHHALDAVILASRKGYSDDGLVDMTLKPKYNKGGEFDPEKHLPEPIEFKMDKGSRGSALHDRNPLSYKKGIITRRFMVTEIECGKEDDVISETYREKLKEAFKRFDTKKGKCLTDKEAKEAGFCIKKNELVMSLKCSIKGTGPGQMIRINNNVFKTNVHNVGVDVYLDEKGKKKAYERKNPRLSKHFIEPPPQPNGRVSFTLKRRDMVTVEGEDAIYRIKKLGTSPTIEAVVGSDGKTRTVSATKLTKANSAELEEGADKRTADGSEFESPKKKRKV

SEQ ID NO: 1177 - protein, 972 aa, unidentified
MTDSQNDTDEYWMGEALKLAQKAWDEGEVPVGAILVRKGEVIGHGWNRSIGSHDPSAHAEIMAIREAGVRIGNYRMLDTVLYVTLEPCAMCAGALVHGRISRLVFGAENPKTGACGSVMDIARHPALNHQLQVDGGVMAAPCARLLSDFYRWRRAQKKAARDNSSGNGTSGGSSGGSSGSETPGTSESATPESSGGSSGGSMERELVLGIAYGGKYTGLAVVDRRHNQVLYANRLKMRDDVAGILKDRRKQRGIRRTAQTKKKRLRELKNYLKSIGYNESTATFETVYSLAHKRGYDYADMPEEKTSEEIEAMDVEERKQWEKEKQEWEETKRNSRHRKEVVKDVHKAMIEGRATEEQIKRVERIFNKQYRPKRFNNRILTKCKVEDCGVNTPLRKNVRDLLIENIVRFFPIEQSEKDNLKDAVLDKNRREEVKSFFRKHKTDEHIRKQVYDIADNKLSGRTVFCKEHILEHTEHSKEERKVFRLAPSLKTKIENVLAVIKDEILPKFTVNKVVMESNNFDIAAKTQGKKRLAKEEYGKGPREGKETRKEALLRETDGRCIYCGKSIDISNAHDDHIFPRKAGGLNIFANLVACCAVCNENKKGRTPLESGISPKPEIIAFMKNDLKKKILEDARNINTVDFNKYMSHASIGWRYMRDRLRESAGNKKLPIERQSGIYTAYFRRWWGFKKERGNTLHHALDAVILASRKGYSDDGLVDMTLKPKYNKGGEFDPEKHLPEPIEFKMDKGSRGSALHDRNPLSYKKGIITRRFMVTEIECGKEDDVISETYREKLKEAFKRFDTKKGKCLTDKEAKEAGFCIKKNELVMSLKCSIKGTGPGQMIRINNNVFKTNVHNVGVDVYLDEKGKKKAYERKNPRLSKHFIEPPPQPNGRVSFTLKRRDMVTVEGEDAIYRIKKLGTSPTIEAVVGSDGKTRTVSATKLTKANSAELEEGADKRTADGSEFESPKKKRKV

SEQ ID NO: 1178 - protein, 972 aa, unidentified
MTDSQNDTDEYWMGEALKLAQKAWDEGEVPVGAILVRKGEVIGHGWNRSIGSHDPSAHAEIMAIREAGVRIGNYRMLDTVLYVTLEPCAMCAGALVHGRISRLVFGAENPKTGACGSVMDIARHPALNHQLQVDGGVMAAPCARLLSDFFRWPRAQKKAARDNSSGNGTSGGSSGGSSGSETPGTSESATPESSGGSSGGSMERELVLGIAYGGKYTGLAVVDRRHNQVLYANRLKMRDDVAGILKDRRKQRGIRRTAQTKKKRLRELKNYLKSIGYNESTATFETVYSLAHKRGYDYADMPEEKTSEEIEAMDVEERKQWEKEKQEWEETKRNSRHRKEVVKDVHKAMIEGRATEEQIKRVERIFNKQYRPKRFNNRILTKCKVEDCGVNTPLRKNVRDLLIENIVRFFPIEQSEKDNLKDAVLDKNRREEVKSFFRKHKTDEHIRKQVYDIADNKLSGRTVFCKEHILEHTEHSKEERKVFRLAPSLKTKIENVLAVIKDEILPKFTVNKVVMESNNFDIAAKTQGKKRLAKEEYGKGPREGKETRKEALLRETDGRCIYCGKSIDISNAHDDHIFPRKAGGLNIFANLVACCAVCNENKKGRTPLESGISPKPEIIAFMKNDLKKKILEDARNINTVDFNKYMSHASIGWRYMRDRLRESAGNKKLPIERQSGIYTAYFRRWWGFKKERGNTLHHALDAVILASRKGYSDDGLVDMTLKPKYNKGGEFDPEKHLPEPIEFKMDKGSRGSALHDRNPLSYKKGIITRRFMVTEIECGKEDDVISETYREKLKEAFKRFDTKKGKCLTDKEAKEAGFCIKKNELVMSLKCSIKGTGPGQMIRINNNVFKTNVHNVGVDVYLDEKGKKKAYERKNPRLSKHFIEPPPQPNGRVSFTLKRRDMVTVEGEDAIYRIKKLGTSPTIEAVVGSDGKTRTVSATKLTKANSAELEEGADKRTADGSEFESPKKKRKV

SEQ ID NO: 1179 - protein, 972 aa, unidentified
MTDSQNDTDEYWMGEALKLAQKAWDEGEVPVGAILVRKGEVIGHGWNRSIGSHDPSAHAEIMAIREAGVRIGNYRMLDTVLYVTLEPCAMCAGALVHGRISRLVFGAENPKTGACGSVMDIARHPALNHQLQVDGGVMAAPCARLLSDFFRWRRRQKKAARDNSSGNGTSGGSSGGSSGSETPGTSESATPESSGGSSGGSMERELVLGIAYGGKYTGLAVVDRRHNQVLYANRLKMRDDVAGILKDRRKQRGIRRTAQTKKKRLRELKNYLKSIGYNESTATFETVYSLAHKRGYDYADMPEEKTSEEIEAMDVEERKQWEKEKQEWEETKRNSRHRKEVVKDVHKAMIEGRATEEQIKRVERIFNKQYRPKRFNNRILTKCKVEDCGVNTPLRKNVRDLLIENIVRFFPIEQSEKDNLKDAVLDKNRREEVKSFFRKHKTDEHIRKQVYDIADNKLSGRTVFCKEHILEHTEHSKEERKVFRLAPSLKTKIENVLAVIKDEILPKFTVNKVVMESNNFDIAAKTQGKKRLAKEEYGKGPREGKETRKEALLRETDGRCIYCGKSIDISNAHDDHIFPRKAGGLNIFANLVACCAVCNENKKGRTPLESGISPKPEIIAFMKNDLKKKILEDARNINTVDFNKYMSHASIGWRYMRDRLRESAGNKKLPIERQSGIYTAYFRRWWGFKKERGNTLHHALDAVILASRKGYSDDGLVDMTLKPKYNKGGEFDPEKHLPEPIEFKMDKGSRGSALHDRNPLSYKKGIITRRFMVTEIECGKEDDVISETYREKLKEAFKRFDTKKGKCLTDKEAKEAGFCIKKNELVMSLKCSIKGTGPGQMIRINNNVFKTNVHNVGVDVYLDEKGKKKAYERKNPRLSKHFIEPPPQPNGRVSFTLKRRDMVTVEGEDAIYRIKKLGTSPTIEAVVGSDGKTRTVSATKLTKANSAELEEGADKRTADGSEFESPKKKRKV

SEQ ID NO: 1180 - protein, 972 aa, unidentified
MTDSQNDTDEYWMGEALKLAQKAWDEGEVPVGAILVRKGEVIGHGWNRSIGSHDPSAHAEIMAIREAGVRIGNYRMLDTVLYVTLEPCAMCAGALVHGRISRLVFGAENPKTGACGSVMDIARHPALNHQLQVDGGVMAAPCARLLSDFFRWRRAVKKAARDNSSGNGTSGGSSGGSSGSETPGTSESATPESSGGSSGGSMERELVLGIAYGGKYTGLAVVDRRHNQVLYANRLKMRDDVAGILKDRRKQRGIRRTAQTKKKRLRELKNYLKSIGYNESTATFETVYSLAHKRGYDYADMPEEKTSEEIEAMDVEERKQWEKEKQEWEETKRNSRHRKEVVKDVHKAMIEGRATEEQIKRVERIFNKQYRPKRFNNRILTKCKVEDCGVNTPLRKNVRDLLIENIVRFFPIEQSEKDNLKDAVLDKNRREEVKSFFRKHKTDEHIRKQVYDIADNKLSGRTVFCKEHILEHTEHSKEERKVFRLAPSLKTKIENVLAVIKDEILPKFTVNKVVMESNNFDIAAKTQGKKRLAKEEYGKGPREGKETRKEALLRETDGRCIYCGKSIDISNAHDDHIFPRKAGGLNIFANLVACCAVCNENKKGRTPLESGISPKPEIIAFMKNDLKKKILEDARNINTVDFNKYMSHASIGWRYMRDRLRESAGNKKLPIERQSGIYTAYFRRWWGFKKERGNTLHHALDAVILASRKGYSDDGLVDMTLKPKYNKGGEFDPEKHLPEPIEFKMDKGSRGSALHDRNPLSYKKGIITRRFMVTEIECGKEDDVISETYREKLKEAFKRFDTKKGKCLTDKEAKEAGFCIKKNELVMSLKCSIKGTGPGQMIRINNNVFKTNVHNVGVDVYLDEKGKKKAYERKNPRLSKHFIEPPPQPNGRVSFTLKRRDMVTVEGEDAIYRIKKLGTSPTIEAVVGSDGKTRTVSATKLTKANSAELEEGADKRTADGSEFESPKKKRKV

SEQ ID NO: 1181 - protein, 972 aa, unidentified
MTDSQNDTDEYWMGEALKLAQKAWDEGEVPVGAILVRKGEVIGHGWNRSIGSHDPSAHAEIMAIREAGVRIGNYRMLDTVLYVTLEPCAMCAGALVHGRISRLVFGAENPKTGACGSVMDIARHPALNHQLQVDGGVMAAPCARLLSDFFRWRRAQFKAARDNSSGNGTSGGSSGGSSGSETPGTSESATPESSGGSSGGSMERELVLGIAYGGKYTGLAVVDRRHNQVLYANRLKMRDDVAGILKDRRKQRGIRRTAQTKKKRLRELKNYLKSIGYNESTATFETVYSLAHKRGYDYADMPEEKTSEEIEAMDVEERKQWEKEKQEWEETKRNSRHRKEVVKDVHKAMIEGRATEEQIKRVERIFNKQYRPKRFNNRILTKCKVEDCGVNTPLRKNVRDLLIENIVRFFPIEQSEKDNLKDAVLDKNRREEVKSFFRKHKTDEHIRKQVYDIADNKLSGRTVFCKEHILEHTEHSKEERKVFRLAPSLKTKIENVLAVIKDEILPKFTVNKVVMESNNFDIAAKTQGKKRLAKEEYGKGPREGKETRKEALLRETDGRCIYCGKSIDISNAHDDHIFPRKAGGLNIFANLVACCAVCNENKKGRTPLESGISPKPEIIAFMKNDLKKKILEDARNINTVDFNKYMSHASIGWRYMRDRLRESAGNKKLPIERQSGIYTAYFRRWWGFKKERGNTLHHALDAVILASRKGYSDDGLVDMTLKPKYNKGGEFDPEKHLPEPIEFKMDKGSRGSALHDRNPLSYKKGIITRRFMVTEIECGKEDDVISETYREKLKEAFKRFDTKKGKCLTDKEAKEAGFCIKKNELVMSLKCSIKGTGPGQMIRINNNVFKTNVHNVGVDVYLDEKGKKKAYERKNPRLSKHFIEPPPQPNGRVSFTLKRRDMVTVEGEDAIYRIKKLGTSPTIEAVVGSDGKTRTVSATKLTKANSAELEEGADKRTADGSEFESPKKKRKV

SEQ ID NO: 1182 - protein, 972 aa, unidentified
MTDSQNDTDEYWMGEALKLAQKAWDEGEVPVGAILVRKGEVIGHGWNRSIGSHDPSAHAEIMAIREAGVRIGNYRMLDTVLYVTLEPCAMCAGALVHGRISRLVFGAENPKTGACGSVMDIARHPALNHQLQVDGGVMAAPCARLLSDFFRWRRAQKNAARDNSSGNGTSGGSSGGSSGSETPGTSESATPESSGGSSGGSMERELVLGIAYGGKYTGLAVVDRRHNQVLYANRLKMRDDVAGILKDRRKQRGIRRTAQTKKKRLRELKNYLKSIGYNESTATFETVYSLAHKRGYDYADMPEEKTSEEIEAMDVEERKQWEKEKQEWEETKRNSRHRKEVVKDVHKAMIEGRATEEQIKRVERIFNKQYRPKRFNNRILTKCKVEDCGVNTPLRKNVRDLLIENIVRFFPIEQSEKDNLKDAVLDKNRREEVKSFFRKHKTDEHIRKQVYDIADNKLSGRTVFCKEHILEHTEHSKEERKVFRLAPSLKTKIENVLAVIKDEILPKFTVNKVVMESNNFDIAAKTQGKKRLAKEEYGKGPREGKETRKEALLRETDGRCIYCGKSIDISNAHDDHIFPRKAGGLNIFANLVACCAVCNENKKGRTPLESGISPKPEIIAFMKNDLKKKILEDARNINTVDFNKYMSHASIGWRYMRDRLRESAGNKKLPIERQSGIYTAYFRRWWGFKKERGNTLHHALDAVILASRKGYSDDGLVDMTLKPKYNKGGEFDPEKHLPEPIEFKMDKGSRGSALHDRNPLSYKKGIITRRFMVTEIECGKEDDVISETYREKLKEAFKRFDTKKGKCLTDKEAKEAGFCIKKNELVMSLKCSIKGTGPGQMIRINNNVFKTNVHNVGVDVYLDEKGKKKAYERKNPRLSKHFIEPPPQPNGRVSFTLKRRDMVTVEGEDAIYRIKKLGTSPTIEAVVGSDGKTRTVSATKLTKANSAELEEGADKRTADGSEFESPKKKRKV

SEQ ID NO: 1183 - protein, 972 aa, unidentified
MTDSQNDTDEYWMGEALKLAQKAWDEGEVPVGAILVRKGEVIGHGWNRSIGSHDPSAHAEIMAIREAGVRIGNYRMLDTVLYVTLEPCAMCAGALVHGRISRLVFGAENPKTGACGSVMDIARHPALNHQLQVDGGVMAAPCARLLSDFFRWRRAQKKAARDNSSINGTSGGSSGGSSGSETPGTSESATPESSGGSSGGSMERELVLGIAYGGKYTGLAVVDRRHNQVLYANRLKMRDDVAGILKDRRKQRGIRRTAQTKKKRLRELKNYLKSIGYNESTATFETVYSLAHKRGYDYADMPEEKTSEEIEAMDVEERKQWEKEKQEWEETKRNSRHRKEVVKDVHKAMIEGRATEEQIKRVERIFNKQYRPKRFNNRILTKCKVEDCGVNTPLRKNVRDLLIENIVRFFPIEQSEKDNLKDAVLDKNRREEVKSFFRKHKTDEHIRKQVYDIADNKLSGRTVFCKEHILEHTEHSKEERKVFRLAPSLKTKIENVLAVIKDEILPKFTVNKVVMESNNFDIAAKTQGKKRLAKEEYGKGPREGKETRKEALLRETDGRCIYCGKSIDISNAHDDHIFPRKAGGLNIFANLVACCAVCNENKKGRTPLESGISPKPEIIAFMKNDLKKKILEDARNINTVDFNKYMSHASIGWRYMRDRLRESAGNKKLPIERQSGIYTAYFRRWWGFKKERGNTLHHALDAVILASRKGYSDDGLVDMTLKPKYNKGGEFDPEKHLPEPIEFKMDKGSRGSALHDRNPLSYKKGIITRRFMVTEIECGKEDDVISETYREKLKEAFKRFDTKKGKCLTDKEAKEAGFCIKKNELVMSLKCSIKGTGPGQMIRINNNVFKTNVHNVGVDVYLDEKGKKKAYERKNPRLSKHFIEPPPQPNGRVSFTLKRRDMVTVEGEDAIYRIKKLGTSPTIEAVVGSDGKTRTVSATKLTKANSAELEEGADKRTADGSEFESPKKKRKV

SEQ ID NO: 1184 - protein, 991 aa, unidentified
MKRTADGSEFESPKKKRKVMTDSQNDTDEYWMGEALKLAQKAWDEGEVPVGAILVRKGEVIGHGWNRSIGSHDPSAHAEIMAIREAGVRIGNYRMLDTVLYVTLEPCAMCAGALVHGRISRLVFGAEDPKTGACGSVMDIARHPALNHQLQVDGGVMAAPCARLLSDFFRWRRAQKKAARDNSSGNGTSGGSSGGSSGSETPGTSESATPESSGGSSGGSMERELVLGIAYGGKYTGLAVVDRRHNQVLYANRLKMRDDVAGILKDRRKQRGIRRTAQTKKKRLRELKNYLKSIGYNESTATFETVYSLAHKRGYDYADMPEEKTSEEIEAMDVEERKQWEKEKQEWEETKRNSRHRKEVVKDVHKAMIEGRATEEQIKRVERIFNKQYRPKRFNNRILTKCKVEDCGVNTPLRKNVRDLLIENIVRFFPIEQSEKDNLKDAVLDKNRREEVKSFFRKHKTDEHIRKQVYDIADNKLSGRTVFCKEHILEHTEHSKEERKVFRLAPSLKTKIENVLAVIKDEILPKFTVNKVVMESNNFDIAAKTQGKKRLAKEEYGKGPREGKETRKEALLRETDGRCIYCGKSIDISNAHDDHIFPRKAGGLNIFANLVACCAVCNENKKGRTPLESGISPKPEIIAFMKNDLKKKILEDARNINTVDFNKYMSHASIGWRYMRDRLRESAGNKKLPIERQSGIYTAYFRRWWGFKKERGNTLHHALDAVILASRKGYSDDGLVDMTLKPKYNKGGEFDPEKHLPEPIEFKMDKGSRGSALHDRNPLSYKKGIITRRFMVTEIECGKEDDVISETYREKLKEAFKRFDTKKGKCLTDKEAKEAGFCIKKNELVMSLKCSIKGTGPGQMIRINNNVFKTNVHNVGVDVYLDEKGKKKAYERKNPRLSKHFIEPPPQPNGRVSFTLKRRDMVTVEGEDAIYRIKKLGTSPTIEAVVGSDGKTRTVSATKLTKANSAELEEGADKRTADGSEFESPKKKRKV

SEQ ID NO: 1185 - protein, 991 aa, unidentified
MKRTADGSEFESPKKKRKVMTDSQNDTDEYWMGEALKLAQKAWDEGEVPVGAILVRKGEVIGHGWNRSIGSHDPSAHAEIMAIREAGVRIGNYRMLDTVLYVTLEPCAMCAGALVHGRISRLVFGAENPKTGACGSVMDIARHPALNHQLQVDGGVMAAPCARLLSDFFRWRRAQKKAARDNSSGNGTSGGSSGGSSGSETPGTSESATPESSGGSSGGSMERELVLGIAYGGKYTGLAVVDRRHNQVLYANRLKMRDDVAGILKDRRKQRGIRRTAQTKKKRLRELKNYLKSIGYNESTATFETVYSLAHKRGYDYADMPEEKTSEEIEAMDVEERKQWEKEKQEWEETKRNSRHRKEVVKDVHKAMIEGRATEEQIKRVERIFNKQYRPKRFNNRILTKCKVEDCGVNTPLRKNVRDLLIENIVRFFPIEQSEKDNLKDAVLDKNRREEVKSFFRKHKTDEHIRKQVYDIADNKLSGRTVFCKEHILEHTEHSKEERKVFRLAPSLKTKIENVLAVIKDEILPKFTVNKVVMESNNFDIAAKTQGKKRLAKEEYGKGPREGKETRKEALLRETDGRCIYCGKSIDISNAHDDHIFPRKAGGLNIFANLVACCAVCNENKKGRTPLESGISPKPEIIAFMKNDLKKKILEDARNINTVDFNKYMSHASIGWRYMRDRLRESAGNKKLPIERQSGIYTAYFRRWWGFKKERGNTLHHALDAVILASRKGYSDDGLVDMTLKPKYNKGGEFDPEKHLPEPIEFKMDKGSRGSALHDRNPLSYKKGIITRRFMVTEIECGKEDDVISETYREKLKEAFKRFDTKKGKCLTDKEAKEAGFCIKKNELVMSLKCSIKGTGPGQMIRINNNVFKTNVHNVGVDVYLDEKGKKKAYERKNPRLSKHFIEPPPQPNGRVSFTLKRRDMVTVEGEDAIYRIKKLGTSPTIEAVVGSDGKTRTVSATKLTKANSAELEEGADKRTADGSEFESPKKKRKV

SEQ ID NO: 1186 - protein, 991 aa, unidentified
MKRTADGSEFESPKKKRKVMTDSQNDTDEYWMGEALKLAQKAWDEGEVPVGAILVRKGEVIGHGWNRSIGSHDPSAHAEIMAIREAGVRIGNYRMLDTVLYVTLEPCAMCAGALVHGRISRLVFGAENPKTGACGSVMDIARHPALNNQLQVDGGVMAAPCARLLSDFFRWRRAQKKAARDNSSGNGTSGGSSGGSSGSETPGTSESATPESSGGSSGGSMERELVLGIAYGGKYTGLAVVDRRHNQVLYANRLKMRDDVAGILKDRRKQRGIRRTAQTKKKRLRELKNYLKSIGYNESTATFETVYSLAHKRGYDYADMPEEKTSEEIEAMDVEERKQWEKEKQEWEETKRNSRHRKEVVKDVHKAMIEGRATEEQIKRVERIFNKQYRPKRFNNRILTKCKVEDCGVNTPLRKNVRDLLIENIVRFFPIEQSEKDNLKDAVLDKNRREEVKSFFRKHKTDEHIRKQVYDIADNKLSGRTVFCKEHILEHTEHSKEERKVFRLAPSLKTKIENVLAVIKDEILPKFTVNKVVMESNNFDIAAKTQGKKRLAKEEYGKGPREGKETRKEALLRETDGRCIYCGKSIDISNAHDDHIFPRKAGGLNIFANLVACCAVCNENKKGRTPLESGISPKPEIIAFMKNDLKKKILEDARNINTVDFNKYMSHASIGWRYMRDRLRESAGNKKLPIERQSGIYTAYFRRWWGFKKERGNTLHHALDAVILASRKGYSDDGLVDMTLKPKYNKGGEFDPEKHLPEPIEFKMDKGSRGSALHDRNPLSYKKGIITRRFMVTEIECGKEDDVISETYREKLKEAFKRFDTKKGKCLTDKEAKEAGFCIKKNELVMSLKCSIKGTGPGQMIRINNNVFKTNVHNVGVDVYLDEKGKKKAYERKNPRLSKHFIEPPPQPNGRVSFTLKRRDMVTVEGEDAIYRIKKLGTSPTIEAVVGSDGKTRTVSATKLTKANSAELEEGADKRTADGSEFESPKKKRKV

SEQ ID NO: 1187 - RNA, 124 nt, synthetic construct
  source 1..124: mol_type = other RNA
tgttacagttaagaaattaattgtaaaacgcctatacagtgaagggatatacgcttgggtttgtccagcctgagcctctatgccagaaatggcgccttcatcgtgggttaggacatttaatttt

SEQ ID NO: 1188 - RNA, 89 nt, synthetic construct
  source 1..89: mol_type = other RNA
agttgagaatcgaaagattcttaataaggcatccttccgatgctgacttctcaccgtccgttttccaataggagcgggcggtatgtttt

SEQ ID NO: 1189 - RNA, 89 nt, synthetic construct; identical to SEQ ID NO: 1188
  source 1..89: mol_type = other RNA

SEQ ID NO: 1190 - RNA, 89 nt, synthetic construct; identical to SEQ ID NO: 1188
  source 1..89: mol_type = other RNA

SEQ ID NO: 1191 - RNA, 89 nt, synthetic construct; identical to SEQ ID NO: 1188
  source 1..89: mol_type = other RNA

SEQ ID NO: 1192 - RNA, 89 nt, synthetic construct; identical to SEQ ID NO: 1188
  source 1..89: mol_type = other RNA

SEQ ID NO: 1193 - RNA, 89 nt, synthetic construct; identical to SEQ ID NO: 1188
  source 1..89: mol_type = other RNA

SEQ ID NO: 1194 - RNA, 89 nt, synthetic construct; identical to SEQ ID NO: 1188
  source 1..89: mol_type = other RNA

SEQ ID NO: 1195 - RNA, 89 nt, synthetic construct; identical to SEQ ID NO: 1188
  source 1..89: mol_type = other RNA

SEQ ID NO: 1196 - RNA, 19 nt, synthetic construct
  source 1..19: mol_type = other RNA
gggaaagacccagcatccg

SEQ ID NO: 1197 - RNA, 21 nt, synthetic construct
  source 1..21: mol_type = other RNA
acagacaaaactgtgctagac

SEQ ID NO: 1198 - RNA, 22 nt, synthetic construct
  source 1..22: mol_type = other RNA
cgaatcctcctcctgaaagtgg

SEQ ID NO: 1199 - RNA, 22 nt, synthetic construct
  source 1..22: mol_type = other RNA
taaacccggccactttcaggag

SEQ ID NO: 1200 - RNA, 22 nt, synthetic construct
  source 1..22: mol_type = other RNA
atcactgacaggttttgaaagt

SEQ ID NO: 1201 - RNA, 22 nt, synthetic construct
  source 1..22: mol_type = other RNA
tcactgacaggttttgaaagtt

SEQ ID NO: 1202 - RNA, 22 nt, synthetic construct
  source 1..22: mol_type = other RNA
gaatcctcctcctgaaagtggc

SEQ ID NO: 1203 - RNA, 22 nt, synthetic construct
  source 1..22: mol_type = other RNA
ttaaacccggccactttcagga

SEQ ID NO: 1204 - RNA, 22 nt, synthetic construct
  source 1..22: mol_type = other RNA
agacagacttgtcactggattt

SEQ ID NO: 1205 - DNA, 7459 bp, synthetic construct
  source 1..7459: mol_type = other DNA
ctgcttgtgtgttggaggtcgctgagtagtgcgcgagcaaaatttaagctacaacaaggcaaggcttgaccgacaattgcatgaagaatctgcttagggttaggcgttttgcgctgcttcgcgatgtacgggccagatatacgcgttgacattgattattgactagttattaatagtaatcaattacggggtcattagttcatagcccatatatggagttccgcgttacataacttacggtaaatggcccgcctggctgaccgcccaacgacccccgcccattgacgtcaataatgacgtatgttcccatagtaacgccaatagggactttccattgacgtcaatgggtggagtatttacggtaaactgcccacttggcagtacatcaagtgtatcatatgccaagtacgccccctattgacgtcaatgacggtaaatggcccgcctggcattatgcccagtacatgaccttatgggactttcctacttggcagtacatctacgtattagtcatcgctattaccatggtgatgcggttttggcagtacatcaatgggcgtggatagcggtttgactcacggggatttccaagtctccaccccattgacgtcaatgggagtttgttttggcaccaaaatcaacgggactttccaaaatgtcgtaacaactccgccccattgacgcaaatgggcggtaggcgtgtacggtgggaggtctatataagcagagctggtttagtgaaccgtcagatccgctagagatccgcggccgcgatggcccccaagaagaagagaaaagtcggcggaggcggcagcagcaccgacatgaagaactacagaatcggcgtggccgtgggcgacagaagcgttggactggctgccatcgagttcgacgatgacggactgcccatccagaagctggccctggtcacattcagacacgacggtggactggaccccaccaagaacaagacccctatgagcagaaaagagacacggggaatcgccagacggaccatgagaatgaacagagagcgcaagagaaggctgaggaacctggacaacgtgctggaaaacctgggctactctgtgcctgagggccctgagcctgagacatacgaggcctggacatctagagccctgctggcctctatcaaactggcctctgccgacgagctgaacgaacaccttgtcagagccgtgcggcacatggccagacatagaggatgggccaatccttggtggtccctggaccagctggaaaaggccagccaagagcctagcgagacattcgagatcatcctggccagagccagagagctgttcggcgagaaggtgcccgctaatcctacactgggaatgctgggagccctggccgctaacaatgaggtgctgctgaggcccagggacgagaagaagagaaagaccggatacgtgcggggcacccctctgatgtttgctcaagttcgacagggcgatcagctggccgagctgcggagaatttgtgaagtgcagggcatcgaggaccagtacgaggctctgagactgggcgtgttcgaccacaagcacccctacgtgcccaaagaaagagtgggcaaagaccctctgaaccccagcaccaacagaaccatcagagccagcctggaatttcaagagttccgcatcctggacagcgtggccaatctgagagtgcggatcggcagcagagccaagagggaactgacagaggccgagtatgatgccgccgtggaattcctgatggactacgccgacaaagagcagcctagctgggccgatgtggccgagaaaattggcgtgcccggcaacagactggtggcccctgttctggaagatgtgcagcagaaaacagccccttacgacagaagcagcgccgcctttgagaaggccatgggcaagaaaaccgaggccagacagtggtgggagtccaccgatgatgaccagctgagaagcctgctgattgccttcctggtggacgccaccaacgacacagaagaagccgctgctgaagccggcctgagcgagctgtataagtcttggcctgccgaggaaagagaggccctgtccaacatcgacttcgagaagggcagagtggcctacagccaagaaaccctgagcaagctgagcgagtacatgcacgagtacagagtgggactgcacgaggctagaaaggccgtgttcggagtggatgatacctggcggcctcctctggataagctggaagaacctacaggacagcctgccgtggacagagtgctgaccatcctgagaagattcgtgctggactgcgagcggcaatggggcagacctagagccatcaccgtggaacacacacggacaggcctgatgggcccaacacagagacagaagatcctgaacgagcagaagaagaaccgggccgacaacgagagaatccgggatgagctgagagaatctggcgtggacaacccctccagagccgaagttcggagacacctgatcgtgcaagagcaagagtgccagtgcctgtactgcggcaccatgatcaccaccaccacaagcgagctggaccacatcgttcctagagccggtggcggcagcagcagaagggaaaatctggccgctgtgtgcagagcctgcaacgccaagaagaaacgcgagctgttctacgcctgggctggcccagtgaagtcccaagagacaatcgagagagtcagacagctgaaggcctttaaggacagcaagaaagccaagatgttcaagaaccagatccgccggctgaaccagaccgaggccgatgagcctatcgacgaaagaagcctggccagcacatcttacgccgctgtggccgttagagagcggctggaacagcacttcaacgaaggcctggcactggacgacaagtccagagtggtgctggatgtgtatgccggcgctgtgaccagagagtctcgtagagctggcggcatcgacgagcggattctgctgagaggcgagcgggacaagaacagattcgatgtgcggcatcacgccgtggacgctgctgttatgaccctgctgaacagatccgtggctctgaccctggaacagagatcacagctgaggcgggccttctacgagcaaggactggacaaactggacagggatcagctgaagcccgaagaggactggcggaacttcatcggactgggtacctcggggagtgaaacacccggcacatccgaaagtgcgacacctgaatctatgaccgactctcaaaatgacactgatgaatactggatgggtgaggctcttaaactggcgcagaaagcctgggacgaaggtgaagtgcctgttggcgccatcctggtccggaaaggggaagtgattgggcacgggtggaatcgaagcattgggtcacacgatccatccgctcatgcagaaattatggcgatcagagaggccggagttcgaatcggaaattatagaatgcttgataccgtgctgtacgtgaccttagagccctgcgcaatgtgcgcaggtgccctggttcatggaagaattagccggctggtgtttggagcagagaaccccaagactggggcttgtggatctgttatggacattgcaaggcatccagccctgaaccatcaactccaagttgatggcggagtcatggctgccccctgcgcccgcttattgtccgacttcttccgctggcgccgtgcgcaaaagaaagctgccagagataactctagcggaaattcggggagtgaaacacccggcacatccgaaagtgcgacacctgaatctggtaccagcctggcctctcaagagaagttcctggaatggaagaaagtgaccaccgtgctgggcgacctgctggctgaagccatcgaggatgattctatcgccgtggtgtcccctctgaggctgaggccacaaaatggcagagtgcacaaggacacaatcgccgccgtgaagaagcagacactgggatctgcttggagcgccgacgccgtgaaaagaatcgtggaccccgagatctacctggctatgaaggatgccctgggcaagtccaaggtgctgccagaggatagcgcccggacactggaactgtccgatggcagatacctggaagccgacgacgaggtgctgttcttcccaaagaacgccgccagcatcctgacacctagaggcgtggcagagatcggcggctctattcaccatgccagactgtatagctggctgaccaagaagggcgagctgaagatcggcatgctgagagtgtacggcgccgagtttccctggctgatgagagagtctggatctcacgacgtgctgcggatgcctattcaccctggcagccagagcttccgggacatgcaggataccaccagaaaagccgtggaaagcagcgaggctgtggaattcgcctggatcacccagaacgatgagctggaattcgagcccgaggactacattgcccacggcggaaaggacgaactgcggcagtttctggaattcatgcctgagtgccgttggagagtggacggcttcaagaagaattaccagatcagaatcaggcccgccatgctgagcagagagcagctgcctagcgacatccagcggagactggaaagcaagaccctgaccgagaacgagtccctgctgctgaaagccctggatacaggactggtggtggccatcggaggactgctgcctctgggaaccctgaaagtgatccggcggaacaatctgggcttccccaggtggcgcggaaacggaaatctgcccaccagctttgaagtgcggagcagcgctctgagagccctgggagttgaaggatctggcggaaaaagacctgccgccacaaagaaagccggacaggccaagaaaaagaagtgaggatcccatcatcaccatcaccattgagtttaaacccgctgatcagcctcgactgtgccttctagttgccagccatctgttgtttgcccctcccccgtgccttccttgaccctggaaggtgccactcccactgtcctttcctaataaaatgaggaaattgcatcgcattgtctgagtaggtgtcattctattctggggggtggggtggggcaggacagcaagggggaggattgggaagacaatagcaggcatgctggggatgcggtgggctctatggcttctgaggcggaaagaaccagctggggctcgataccgtcgacctctagctagagcttggcgtaatcatggtcatagctgtttcctgtgtgaaattgttatccgctcacaattccacacaacatacgagccggaagcataaagtgtaaagcctagggtgcctaatgagtgagctaactcacattaattgcgttgcgctcactgcccgctttccagtcgggaaacctgtcgtgccagctgcattaatgaatcggccaacgcgcggggagaggcggtttgcgtattgggcgctcttccgcttcctcgctcactgactcgctgcgctcggtcgttcggctgcggcgagcggtatcagctcactcaaaggcggtaatacggttatccacagaatcaggggataacgcaggaaagaacatgtgagcaaaaggccagcaaaaggccaggaaccgtaaaaaggccgcgttgctggcgtttttccataggctccgcccccctgacgagcatcacaaaaatcgacgctcaagtcagaggtggcgaaacccgacaggactataaagataccaggcgtttccccctggaagctccctcgtgcgctctcctgttccgaccctgccgcttaccggatacctgtccgcctttctcccttcgggaagcgtggcgctttctcatagctcacgctgtaggtatctcagttcggtgtaggtcgttcgctccaagctgggctgtgtgcacgaaccccccgttcagcccgaccgctgcgccttatccggtaactatcgtcttgagtccaacccggtaagacacgacttatcgccactggcagcagccactggtaacaggattagcagagcgaggtatgtaggcggtgctacagagttcttgaagtggtggcctaactacggctacactagaagaacagtatttggtatctgcgctctgctgaagccagttaccttcggaaaaagagttggtagctcttgatccggcaaacaaaccaccgctggtagcggtggtttttttgtttgcaagcagcagattacgcgcagaaaaaaaggatctcaagaagatcctttgatcttttctacggggtctgacgctcagtggaacgaaaactcacgttaagggattttggtcatgagattatcaaaaaggatcttcacctagatccttttaaattaaaaatgaagttttaaatcaatctaaagtatatatgagtaaacttggtctgacagttaccaatgcttaatcagtgaggcacctatctcagcgatctgtctatttcgttcatccatagttgcctgactccccgtcgtgtagataactacgatacgggagggcttaccatctggccccagtgctgcaatgataccgcgagacccacgctcaccggctccagatttatcagcaataaaccagccagccggaagggccgagcgcagaagtggtcctgcaactttatccgcctccatccagtctattaattgttgccgggaagctagagtaagtagttcgccagttaatagtttgcgcaacgttgttgccattgctacaggcatcgtggtgtcacgctcgtcgtttggtatggcttcattcagctccggttcccaacgatcaaggcgagttacatgatcccccatgttgtgcaaaaaagcggttagctccttcggtcctccgatcgttgtcagaagtaagttggccgcagtgttatcactcatggttatggcagcactgcataattctcttactgtcatgccatccgtaagatgcttttctgtgactggtgagtactcaaccaagtcattctgagaatagtgtatgcggcgaccgagttgctcttgcccggcgtcaatacgggataataccgcgccacatagcagaactttaaaagtgctcatcattggaaaacgttcttcggggcgaaaactctcaaggatcttaccgctgttgagatccagttcgatgtaacccactcgtgcacccaactgatcttcagcatcttttactttcaccagcgtttctgggtgagcaaaaacaggaaggcaaaatgccgcaaaaaagggaataagggcgacacggaaatgttgaatactcatactcttcctttttcaatattattgaagcatttatcagggttattgtctcatgagcggatacatatttgaatgtatttagaaaaataaacaaataggggttccgcgcacatttccccgaaaagtgccacctgacgtcgaccctagggtcgactctcagtacaatctgctctgatgccgaagcttcatagttaagccagtatctgctcc

SEQ ID NO: 1206 - DNA, 2837 bp, synthetic construct
  source 1..2837: mol_type = other DNA
ttctgaggcggaaagaaccagctggggctcgataccgtcgacctctagctagagcttggcgtaatcatggtcatagctgtttcctgtgtgaaattgttatccgctcacaattccacacaacatacgagccggaagcataaagtgtaaagcctagggtgcctaatgagtgagctaactcacattaattgcgttgcgctcactgcccgctttccagtcgggaaacctgtcgtgccagctgcattaatgaatcggccaacgcgcggggagaggcggtttgcgtattgggcgctcttccgcttcctcgctcactgactcgctgcgctcggtcgttcggctgcggcgagcggtatcagctcactcaaaggcggtaatacggttatccacagaatcaggggataacgcaggaaagaacatgtgagcaaaaggccagcaaaaggccaggaaccgtaaaaaggccgcgttgctggcgtttttccataggctccgcccccctgacgagcatcacaaaaatcgacgctcaagtcagaggtggcgaaacccgacaggactataaagataccaggcgtttccccctggaagctccctcgtgcgctctcctgttccgaccctgccgcttaccggatacctgtccgcctttctcccttcgggaagcgtggcgctttctcatagctcacgctgtaggtatctcagttcggtgtaggtcgttcgctccaagctgggctgtgtgcacgaaccccccgttcagcccgaccgctgcgccttatccggtaactatcgtcttgagtccaacccggtaagacacgacttatcgccactggcagcagccactggtaacaggattagcagagcgaggtatgtaggcggtgctacagagttcttgaagtggtggcctaactacggctacactagaagaacagtatttggtatctgcgctctgctgaagccagttaccttcggaaaaagagttggtagctcttgatccggcaaacaaaccaccgctggtagcggtggtttttttgtttgcaagcagcagattacgcgcagaaaaaaaggatctcaagaagatcctttgatcttttctacggggtctgacgctcagtggaacgaaaactcacgttaagggattttggtcatgagattatcaaaaaggatcttcacctagatccttttaaattaaaaatgaagttttaaatcaatctaaagtatatatgagtaaacttggtctgacagttaccaatgcttaatcagtgaggcacctatctcagcgatctgtctatttcgttcatccatagttgcctgactccccgtcgtgtagataactacgatacgggagggcttaccatctggccccagtgctgcaatgataccgcgagacccacgctcaccggctccagatttatcagcaataaaccagccagccggaagggccgagcgcagaagtggtcctgcaactttatccgcctccatccagtctattaattgttgccgggaagctagagtaagtagttcgccagttaatagtttgcgcaacgttgttgccattgctacaggcatcgtggtgtcacgctcgtcgtttggtatggcttcattcagctccggttcccaacgatcaaggcgagttacatgatcccccatgttgtgcaaaaaagcggttagctccttcggtcctccgatcgttgtcagaagtaagttggccgcagtgttatcactcatggttatggcagcactgcataattctcttactgtcatgccatccgtaagatgcttttctgtgactggtgagtactcaaccaagtcattctgagaatagtgtatgcggcgaccgagttgctcttgcccggcgtcaatacgggataataccgcgccacatagcagaactttaaaagtgctcatcattggaaaacgttcttcggggcgaaaactctcaaggatcttaccgctgttgagatccagttcgatgtaacccactcgtgcacccaactgatcttcagcatcttttactttcaccagcgtttctgggtgagcaaaaacaggaaggcaaaatgccgcaaaaaagggaataagggcgacacggaaatgttgaatactcatactcttcctttttcaatattattgaagcatttatcagggttattgtctcatgagcggatacatatttgaatgtatttagaaaaataaacaaataggggttccgcgcacatttccccgaaaagtgccacctgacgtcgaccctagggtcgactctcagtacaatctgctctgatgccgaagcttgagggcctatttcccatgattccttcatatttgcatatacgatacaaggctgttagagagataattagaattaatttgactgtaaacacaaagatattagtacaaaatacgtgacgtagaaagtaataatttcttgggtagtttgcagttttaaaattatgttttaaaatggactatcatatgcttaccgtaacttgaaagtatttcgatttcttggctttatatatcttgtggaaaggacgaaacaccacagacaaaactgtgctagacagttgagaatcgaaagattcttaataaggcatccttccgatgctgacttctcaccgtccgttttccaataggagcgggcggtatgtttttttcatagttaagccagtatctgctccctgcttgtgtgttggaggtcgctgagtagtgcgcgagcaaaatttaagctacaacaaggcaaggcttgaccgacaattgcatgaagaatctgcttagggttaggcgttttgcgctgcttcgcgatgtacgggccagatatacgcgttgcatgctggggatgcggtgggctctatggc

SEQ ID NO: 1207 - DNA, 6653 bp, synthetic construct
  source 1..6653: mol_type = other DNA
ctgcttgtgtgttggaggtcgctgagtagtgcgcgagcaaaatttaagctacaacaaggcaaggcttgaccgacaattgcatgaagaatctgcttagggttaggcgttttgcgctgcttcgcgatgtacgggccagatatacgcgttgacattgattattgactagttattaatagtaatcaattacggggtcattagttcatagcccatatatggagttccgcgttacataacttacggtaaatggcccgcctggctgaccgcccaacgacccccgcccattgacgtcaataatgacgtatgttcccatagtaacgccaatagggactttccattgacgtcaatgggtggagtatttacggtaaactgcccacttggcagtacatcaagtgtatcatatgccaagtacgccccctattgacgtcaatgacggtaaatggcccgcctggcattatgcccagtacatgaccttatgggactttcctacttggcagtacatctacgtattagtcatcgctattaccatggtgatgcggttttggcagtacatcaatgggcgtggatagcggtttgactcacggggatttccaagtctccaccccattgacgtcaatgggagtttgttttggcaccaaaatcaacgggactttccaaaatgtcgtaacaactccgccccattgacgcaaatgggcggtaggcgtgtacggtgggaggtctatataagcagagctggtttagtgaaccgtcagatccgctagagatccgcggccgcgatgaccgactctcaaaatgacactgatgaatactggatgggtgaggctcttaaactggcgcagaaagcctgggacgaaggtgaagtgcctgttggcgccatcctggtccggaaaggggaagtgattgggcacgggtggaatcgaagcattgggtcacacgatccatccgctcatgcagaaattatggcgatcagagaggccggagttcgaatcggaaattatagaatgcttgataccgtgctgtacgtgaccttagagccctgcgcaatgtgcgcaggtgccctggttcatggaagaattagccggctggtgtttggagcagagaaccccaagactggggcttgtggatctgttatggacattgcaaggcatccagccctgaaccatcaactccaagttgatggcggagtcatggctgccccctgcgcccgcttattgtccgacttcttccgctggcgccgtgcgcaaaagaaagctgccagagataactctagcggaaatggtacctcaggcgggtcttccggcggcagtagtgggagcgaaacaccgggcacaagtgagagcgcaacaccggaatcatctggcggttcaagcggcggatccatggaacgcgaattggtcttgggaattgcgtatggcggaaagtacactggtctggccgtcgtcgataggagacataaccaagtgctctacgcaaatagactgaagatgagggatgatgtcgccggcattcttaaagaccgccggaagcaaaggggcatcaggcgcaccgcccaaacaaagaagaagcgtttgcgagaacttaagaattatctcaaaagtataggttacaatgagtcaaccgctacttttgaaacggtttactcactggctcacaagaggggctatgactatgctgatatgcccgaggaaaagactagtgaagaaattgaagcaatggacgtggaagagcggaaacaatgggaaaaggagaaacaagagtgggaagagactaaacgaaactctagacatcgtaaagaagtcgtgaaggatgtccacaaagctatgattgaaggcagggctactgaggaacaaattaaaagagtggaacggatatttaataaacaatacagacccaagcgattcaataatcgcatcctgacaaaatgcaaggtcgaagactgcggagtcaacacccctttgaggaagaatgttagggatctcctgatagaaaatattgtgaggttcttcccaatagaacaatctgaaaaggataacttgaaggacgccgtgttggataagaatagaagggaagaagtcaagtccttctttaggaaacataaaaccgatgagcatatacgcaaacaggtgtatgatatagccgataacaagctctctggcaggacagtcttttgcaaggagcacattctggaacacacagaacattctaaggaagagaggaaagtattcagactcgctccgagtcttaagaccaaaatagagaatgtccttgccgtaattaaagatgaaatcctgcctaagttcaccgtcaataaagtcgtgatggagtctaacaatttcgacatcgctgccaaaactcaaggcaagaaacggctcgccaaagaagagtatggtaagggaccacgtgaaggcaaagaaaccaggaaagaagctctcctgcgggagactgatggcagatgcatatattgtgggaagtcaatagatatctccaatgctcatgacgaccatatctttcctcgaaaggccggcggactgaacatcttcgcaaatcttgtagcatgctgtgccgtgtgtaatgagaataagaaagggcggacacctctggaatcaggtattagcccaaagccagagatcatcgctttcatgaagaatgatctcaagaagaagatccttgaagacgcccgaaacataaacacggtggatttcaataagtacatgtcacatgccagcattggctggagatatatgagagaccgacttagggaatctgccgggaataagaagctcccgattgagaggcaaagcgggatctatacggcatactttcggagatggtggggattcaagaaggagcggggcaatacactccaccatgccttggatgctgttatcctggcgtcccggaaaggatatagcgatgacgggttggttgacatgacattgaaacctaaatacaacaaaggtggagagttcgatccagaaaagcacctgccagaacctattgagttcaaaatggacaaaggttccaggggatctgcacttcatgatagaaaccccttgtcctataagaagggaattattactcgtaggttcatggtcactgaaatcgagtgcgggaaagaggatgacgtgatctcagaaacttacagagagaaactcaaagaggcattcaagcgctttgataccaagaaaggaaaatgtctgaccgacaaggaagccaaagaggccggattctgcatcaagaagaatgagctggtgatgagtcttaaatgttccatcaaaggaacaggccctgggcaaatgattcgcattaacaacaatgtattcaaaactaacgttcataatgttggggttgatgtttatctcgacgagaaaggcaagaagaaagcctacgaaagaaagaacccgcggttgagcaaacatttcattgagccaccaccacagcctaatggaagggttagcttcactctcaaacggagagacatggtaactgtcgagggagaagatgcaatttataggatcaagaagctcggtacatctcccactatagaggccgtcgtaggatcagacggaaagacccggactgtgtcagcaacaaaacttaccaaggctaacagtgctgagctcgaggagggagctgataagcgcaccgccgatggttccgagttcgaaagccccaagaagaagaggaaagtctaaccatcatcaccatcaccattgagtttaaacccgctgatcagcctcgactgtgccttctagttgccagccatctgttgtttgcccctcccccgtgccttccttgaccctggaaggtgccactcccactgtcctttcctaataaaatgaggaaattgcatcgcattgtctgagtaggtgtcattctattctggggggtggggtggggcaggacagcaagggggaggattgggaagacaatagcaggcatgctggggatgcggtgggctctatggcttctgaggcggaaagaaccagctggggctcgataccgtcgacctctagctagagcttggcgtaatcatggtcatagctgtttcctgtgtgaaattgttatccgctcacaattccacacaacatacgagccggaagcataaagtgtaaagcctagggtgcctaatgagtgagctaactcacattaattgcgttgcgctcactgcccgctttccagtcgggaaacctgtcgtgccagctgcattaatgaatcggccaacgcgcggggagaggcggtttgcgtattgggcgctcttccgcttcctcgctcactgactcgctgcgctcggtcgttcggctgcggcgagcggtatcagctcactcaaaggcggtaatacggttatccacagaatcaggggataacgcaggaaagaacatgtgagcaaaaggccagcaaaaggccaggaaccgtaaaaaggccgcgttgctggcgtttttccataggctccgcccccctgacgagcatcacaaaaatcgacgctcaagtcagaggtggcgaaacccgacaggactataaagataccaggcgtttccccctggaagctccctcgtgcgctctcctgttccgaccctgccgcttaccggatacctgtccgcctttctcccttcgggaagcgtggcgctttctcatagctcacgctgtaggtatctcagttcggtgtaggtcgttcgctccaagctgggctgtgtgcacgaaccccccgttcagcccgaccgctgcgccttatccggtaactatcgtcttgagtccaacccggtaagacacgacttatcgccactggcagcagccactggtaacaggattagcagagcgaggtatgtaggcggtgctacagagttcttgaagtggtggcctaactacggctacactagaagaacagtatttggtatctgcgctctgctgaagccagttaccttcggaaaaagagttggtagctcttgatccggcaaacaaaccaccgctggtagcggtggtttttttgtttgcaagcagcagattacgcgcagaaaaaaaggatctcaagaagatcctttgatcttttctacggggtctgacgctcagtggaacgaaaactcacgttaagggattttggtcatgagattatcaaaaaggatcttcacctagatccttttaaattaaaaatgaagttttaaatcaatctaaagtatatatgagtaaacttggtctgacagttaccaatgcttaatcagtgaggcacctatctcagcgatctgtctatttcgttcatccatagttgcctgactccccgtcgtgtagataactacgatacgggagggcttaccatctggccccagtgctgcaatgataccgcgagacccacgctcaccggctccagatttatcagcaataaaccagccagccggaagggccgagcgcagaagtggtcctgcaactttatccgcctccatccagtctattaattgttgccgggaagctagagtaagtagttcgccagttaatagtttgcgcaacgttgttgccattgctacaggcatcgtggtgtcacgctcgtcgtttggtatggcttcattcagctccggttcccaacgatcaaggcgagttacatgatcccccatgttgtgcaaaaaagcggttagctccttcggtcctccgatcgttgtcagaagtaagttggccgcagtgttatcactcatggttatggcagcactgcataattctcttactgtcatgccatccgtaagatgcttttctgtgactggtgagtactcaaccaagtcattctgagaatagtgtatgcggcgaccgagttgctcttgcccggcgtcaatacgggataataccgcgccacatagcagaactttaaaagtgctcatcattggaaaacgttcttcggggcgaaaactctcaaggatcttaccgctgttgagatccagttcgatgtaacccactcgtgcacccaactgatcttcagcatcttttactttcaccagcgtttctgggtgagcaaaaacaggaaggcaaaatgccgcaaaaaagggaataagggcgacacggaaatgttgaatactcatactcttcctttttcaatattattgaagcatttatcagggttattgtctcatgagcggatacatatttgaatgtatttagaaaaataaacaaataggggttccgcgcacatttccccgaaaagtgccacctgacgtcgaccctagggtcgactctcagtacaatctgctctgatgccgagagggcctatttcccatgattccttcatatttgcatatacgatacaaggctgttagagagataattagaattaatttgactgtaaacacaaagatattagtacaaaatacgtgacgtagaaagtaataatttcttgggtagtttgcagttttaaaattatgttttaaaatggactatcatatgcttaccgtaacttgaaagtatttcgatttcttggctttatatatcttgtggaaaggacgaaacaccgggaaagacccagcatccgtgttacagttaagaaattaattgtaaaacgcctatacagtgaagggatatacgcttgggtttgtccagcctgagcctctatgccagaaatggcgccttcatcgtgggttaggacatttaatttttttcatagttaagccagtatctgctcc

SEQ ID NO: 1208 - protein, 236 aa, unidentified
MASETGPSAGDPTLRRRIEPWEFEVFFDPRELRRETCLLYEIQWGTSHRRWRKSGKNTTNHAEVNFIEKLTSERQFCPSVRCSITWFLSASPCWECSQAIQEFLSQHPNVTLVIYVARLYYHMDQRNRQGLRDLVNSGVTIQIMSVPEYCYCWRNFVNFPPGQEAHWPRYQPQWMALYELELHCIILSLPPCLKISRRCQKQLTFFGLTLQNCHYQAIPPHILLATGLVLPFVPWR

SEQ ID NO: 1209 - protein, 236 aa, unidentified
MASETGPSAGDPTLRRRIEPWEFEVFFDPRELRRETCLLYEIQWGTSHRRWRKSGKNTTNHAEVNFIEKLTSERQFCPSVRCSITWFLSFSPCWECSQAIQEFLSQHPNVTLVIYVARLYYHMDQRNRQGLRDLVNSGVTIQIMSVPEYCYCWRNFVNFPPGQEAHWPRYQPQWMALYELELHCIILSLPPCLKISRRCQKQLTFFGLTLQNCHYQAIPPHILLATGLVLPFVPWR

SEQ ID NO: 1210 - protein, 236 aa, unidentified
MASETGPSAGDPTLRRRIEPWEFEVFFDPRELRRETCLLYEIQWGTSHRRWRKSGKNTTNHAEVNFIEKLTSERQFCPSVRCSITWFLSHSPCWECSQAIQEFLSQHPNVTLVIYVARLYYHMDQRNRQGLRDLVNSGVTIQIMSVPEYCYCWRNFVNFPPGQEAHWPRYQPQWMALYELELHCIILSLPPCLKISRRCQKQLTFFGLTLQNCHYQAIPPHILLATGLVLPFVPWR

SEQ ID NO: 1211 - protein, 236 aa, unidentified
MASETGPSAGDPTLRRRIEPWEFEVFFDPRELRRETCLLYEIQWGTSHRRWRKSGKNTTNHAEVNFIEKLTSERQFCPSVRCSITWFLSYSPCWECSQAIQEFLSQHPNVTLVIYVARLYYHMDQRNRQGLRDLVNSGVTIQIMSVPEYCYCWRNFVNFPPGQEAHWPRYQPQWMALYELELHCIILSLPPCLKISRRCQKQLTFFGLTLQNCHYQAIPPHILLATGLVLPFVPWR

SEQ ID NO: 1212 - protein, 236 aa, unidentified
MASETGPSAGDPTLRRRIEPWEFEVFFDPRELRRETCLLYEIQWGTSHRRWRKSGKNTTNHAEVNFIEKLTSERQFCPSVRCSITWFLSWSPCWECSQAIQEFLSQHPNVTLVIYVARLFYHMDQRNRQGLRDLVNSGVTIQIMSVPEYCYCWRNFVNFPPGQEAHWPRYQPQWMALYELELHCIILSLPPCLKISRRCQKQLTFFGLTLQNCHYQAIPPHILLATGLVLPFVPWR

SEQ ID NO: 1213 - protein, 236 aa, unidentified
MASETGPSAGDPTLRRRIEPWEFEVFFDPRELRRETCLLYEIQWGTSHRRWRKSGKNTTNHAEVNFIEKLTSERQFCPSVRCSITWFLSWSPCWECSQAIQEFLSQHPNVTLVIYVARLHYHMDQRNRQGLRDLVNSGVTIQIMSVPEYCYCWRNFVNFPPGQEAHWPRYQPQWMALYELELHCIILSLPPCLKISRRCQKQLTFFGLTLQNCHYQAIPPHILLATGLVLPFVPWR

SEQ ID NO: 1214 - protein, 236 aa, unidentified
MASETGPSAGDPTLRRRIEPWEFEVFFDPRELRRETCLLYEIQWGTSHRRWRKSGKNTTNHAEVNFIEKLTSERQFCPSVRCSITWFLSWSPCWECSQAIQEFLSQHPNVTLVIYVARLYFHMDQRNRQGLRDLVNSGVTIQIMSVPEYCYCWRNFVNFPPGQEAHWPRYQPQWMALYELELHCIILSLPPCLKISRRCQKQLTFFGLTLQNCHYQAIPPHILLATGLVLPFVPWR

SEQ ID NO: 1215 - protein, 236 aa, unidentified
MASETGPSAGDPTLRRRIEPWEFEVFFDPRELRRETCLLYEIQWGTSHRRWRKSGKNTTNHAEVNFIEKLTSERQFCPSVRCSITWFLSWSPCWECSQAIQEFLSQHPNVTLVIYVARLYHHMDQRNRQGLRDLVNSGVTIQIMSVPEYCYCWRNFVNFPPGQEAHWPRYQPQWMALYELELHCIILSLPPCLKISRRCQKQLTFFGLTLQNCHYQAIPPHILLATGLVLPFVPWR

SEQ ID NO: 1216 - protein, 236 aa, unidentified
MASETGPSAGDPTLRRRIEPWEFEVFFDPRELRRETCLLYEIQWGTSHRRWRKSGKNTTNHAEVNFIEKLTSERQFCPSVRCSITWFLSWSPCWECSQAIQEFLSQHPNVTLVIYVARLYQHMDQRNRQGLRDLVNSGVTIQIMSVPEYCYCWRNFVNFPPGQEAHWPRYQPQWMALYELELHCIILSLPPCLKISRRCQKQLTFFGLTLQNCHYQAIPPHILLATGLVLPFVPWR

SEQ ID NO: 1217 - protein, 236 aa, unidentified
MASETGPSAGDPTLRRRIEPWEFEVFFDPRELRRETCLLYEIQWGTSHRRWRKSGKNTTNHAEVNFIEKLTSERQFCPSVRCSITWFLSWSPCWECSQAIQEFLSQHPNVTLVIYVARLYAHMDQRNRQGLRDLVNSGVTIQIMSVPEYCYCWRNFVNFPPGQEAHWPRYQPQWMALYELELHCIILSLPPCLKISRRCQKQLTFFGLTLQNCHYQAIPPHILLATGLVLPFVPWR

SEQ ID NO: 1218 - protein, 236 aa, unidentified
MASETGPSAGDPTLRRRIEPWEFEVFFDPRELRRETCLLYEIQWGTSHRRWRKSGKNTTNHAEVNFIEKLTSERQFCPSVRCSITWFLSWSPCWECSQAIQEFLSQHPNVTLVIYVARLYDHMDQRNRQGLRDLVNSGVTIQIMSVPEYCYCWRNFVNFPPGQEAHWPRYQPQWMALYELELHCIILSLPPCLKISRRCQKQLTFFGLTLQNCHYQAIPPHILLATGLVLPFVPWR

SEQ ID NO: 1219 - protein, 236 aa, unidentified
MASETGPSAGDPTLRRRIEPWEFEVFFDPRELRRETCLLYEIQWGTSHRRWRKSGKNTTNHAEVNFIEKLTSERQFCPSVRCSITWFLSWSPCWECSQAIQEFLSQHPNVTLVIYVARLYWHMDQRNRQGLRDLVNSGVTIQIMSVPEYCYCWRNFVNFPPGQEAHWPRYQPQWMALYELELHCIILSLPPCLKISRRCQKQLTFFGLTLQNCHYQAIPPHILLATGLVLPFVPWR

SEQ ID NO: 1220 - protein, 236 aa, unidentified
MASETGPSAGDPTLRRRIEPWEFEVFFDPRELRRETCLLYEIQWGTSHRRWRKSGKNTTNHAEVNFIEKLTSERQFCPSVRCSITWFLSWSPCWECSQAIQEFLSQHPNVTLVIYVARLYYYMDQRNRQGLRDLVNSGVTIQIMSVPEYCYCWRNFVNFPPGQEAHWPRYQPQWMALYELELHCIILSLPPCLKISRRCQKQLTFFGLTLQNCHYQAIPPHILLATGLVLPFVPWR

SEQ ID NO: 1221 - protein, 236 aa, unidentified
MASETGPSAGDPTLRRRIEPWEFEVFFDPRELRRETCLLYEIQWGTSHRRWRKSGKNTTNHAEVNFIEKLTSERQFCPSVRCSITWFLSWSPCWECSQAIQEFLSQHPNVTLVIYVARLYYFMDQRNRQGLRDLVNSGVTIQIMSVPEYCYCWRNFVNFPPGQEAHWPRYQPQWMALYELELHCIILSLPPCLKISRRCQKQLTFFGLTLQNCHYQAIPPHILLATGLVLPFVPWR

SEQ ID NO: 1222 - protein, 236 aa, unidentified
MASETGPSAGDPTLRRRIEPWEFEVFFDPRELRRETCLLYEIQWGTSHRRWRKSGKNTTNHAEVNFIEKLTSERQFCPSVRCSITWFLSWSPCWECSQAIQEFLSQHPNVTLVIYVARLYYIMDQRNRQGLRDLVNSGVTIQIMSVPEYCYCWRNFVNFPPGQEAHWPRYQPQWMALYELELHCIILSLPPCLKISRRCQKQLTFFGLTLQNCHYQAIPPHILLATGLVLPFVPWR

SEQ ID NO: 1223 - protein, 236 aa, unidentified
MASETGPSAGDPTLRRRIEPWEFEVFFDPRELRRETCLLYEIQWGTSHRRWRKSGKNTTNHAEVNFIEKLTSERQFCPSVRCSITWFLSWSPCWECSQAIQEFLSQHPNVTLVIYVARLYYAMDQRNRQGLRDLVNSGVTIQIMSVPEYCYCWRNFVNFPPGQEAHWPRYQPQWMALYELELHCIILSLPPCLKISRRCQKQLTFFGLTLQNCHYQAIPPHILLATGLVLPFVPWR

SEQ ID NO: 1224 - protein, 236 aa, unidentified
MASETGPSAGDPTLRRRIEPWEFEVFFDPRELRRETCLLYEIQWGTSHRRWRKSGKNTTNHAEVNFIEKLTSERQFCPSVRCSITWFLSWSPCWECSQAIQEFLSQHPNVTLVIYVARLYYWMDQRNRQGLRDLVNSGVTIQIMSVPEYCYCWRNFVNFPPGQEAHWPRYQPQWMALYELELHCIILSLPPCLKISRRCQKQLTFFGLTLQNCHYQAIPPHILLATGLVLPFVPWR

SEQ ID NO: 1225 - protein, 236 aa, unidentified
MASETGPSAGDPTLRRRIEPWEFEVFFDPRELRRETCLLYEIQWGTSHRRWRKSGKNTTNHAEVNFIEKLTSERQFCPSVRCSITWFLSWSPCWECSQAIQEFLSQHPNVTLVIYVARLYYDMDQRNRQGLRDLVNSGVTIQIMSVPEYCYCWRNFVNFPPGQEAHWPRYQPQWMALYELELHCIILSLPPCLKISRRCQKQLTFFGLTLQNCHYQAIPPHILLATGLVLPFVPWR

SEQ ID NO: 1226 - protein, 237 aa, unidentified
MASETGPSAGDPTLRRRIEPWEFEVFFDPRELRRETCLLYEIQWGTSHRRWRKSGKNTTNHAEVNFIEKLTSERQFCPSVRCSITWFLSWSPCWECSQAIQEFLSQHPNVTLVIYVARLYFCEDRKAEPEGLRDLVNSGVTIQIMSVPEYCYCWRNFVNFPPGQEAHWPRYQPQWMALYELELHCIILSLPPCLKISRRCQKQLTFFGLTLQNCHYQAIPPHILLATGLVLPFVPWR

SEQ ID NO: 1227 - protein, 238 aa, unidentified
MASETGPSAGDPTLRRRIEPWEFEVFFDPRELRRETCLLYEIQWGTSHRRWRKSGKNTTNHAEVNFIEKLTSERQFCPSVRCSITWFLSWSPCWECSQAIQEFLSQHPNVTLVIYVARLYLYYIQKEENQNGLRDLVNSGVTIQIMSVPEYCYCWRNFVNFPPGQEAHWPRYQPQWMALYELELHCIILSLPPCLKISRRCQKQLTFFGLTLQNCHYQAIPPHILLATGLVLPFVPWR

SEQ ID NO: 1228 - protein, 187 aa, unidentified
MASETGPSAGDPTLRRRIEPWEFEVFFDPRELRRETCLLYEIQWGTSHRRWRKSGKNTTNHAEVNFIEKLTSERQFCPSVRCSITWFLSWSPCWECSQAIQEFLSQHPNVTLVIYVARLYYHMDQRNRQGLRDLVNSGVTIQIMSVPEYCYCWRNFVNFPPGQEAHWPRYQPQWMALYELELHCIIL

SEQ ID NO: 1229 - protein, 236 aa, unidentified
MASETGPSAGDPTLRRRIEPWEFEVFFDPRELRRETCLLYEIQWGTSHRRWRKSGKNTTNHAEVNFIEKLTSERQFCPSVRCSITWFLSWSPCWECSQAIQEFLSQHPNVTLVIYVARLYTHMDQRNRQGLRDLVNSGVTIQIMSVPEYCYCWRNFVNFPPGQEAHWPRYQPQWMALYELELHCIILSLPPCLKISRRCQKQLTFFGLTLQNCHYQAIPPHILLATGLVLPFVPWR

SEQ ID NO: 1230 - protein, 237 aa, unidentified
MASETGPSAGDPTLRRRIEPWEFEVFFDPRELRRETCLLYEIQWGTSHRRWRKSGKNTTNHAEVNFIEKLTSERQFCPSVRCSITWFLSWSPCWECSQAIQEFLSQHPNVTLVIYVARLYFCEDRKANRQGLRDLVNSGVTIQIMSVPEYCYCWRNFVNFPPGQEAHWPRYQPQWMALYELELHCIILSLPPCLKISRRCQKQLTFFGLTLQNCHYQAIPPHILLATGLVLPFVPWR

SEQ ID NO: 1231 - protein, 237 aa, unidentified
MASETGPSAGDPTLRRRIEPWEFEVFFDPRELRRETCLLYEIQWGTSHRRWRKSGKNTTNHAEVNFIEKLTSERQFCPSVRCSITWFLSWSPCWECSQAIQEFLSQHPNVTLVIYVARLYFHEDRKANRQGLRDLVNSGVTIQIMSVPEYCYCWRNFVNFPPGQEAHWPRYQPQWMALYELELHCIILSLPPCLKISRRCQKQLTFFGLTLQNCHYQAIPPHILLATGLVLPFVPWR

SEQ ID NO: 1232 - protein, 236 aa, unidentified
MASETGPSAGDPTLRRRIEPWEFEVFFDPRELARETCLLYEIQWGTSHRRWRKSGKNTTNHAEVNFIEKLTSERQFCPSVRCSITWFLSWSPCWECSQAIQEFLSQHPNVTLVIYVARLYYHMDQRNRQGLRDLVNSGVTIQIMSVPEYCYCWRNFVNFPPGQEAHWPRYQPQWMALYELELHCIILSLPPCLKISRRCQKQLTFFGLTLQNCHYQAIPPHILLATGLVLPFVPWR

SEQ ID NO: 1233 - protein, 236 aa, unidentified
MASETGPSAGDPTLRRRIEPWEFEVFFDPRELRAETCLLYEIQWGTSHRRWRKSGKNTTNHAEVNFIEKLTSERQFCPSVRCSITWFLSWSPCWECSQAIQEFLSQHPNVTLVIYVARLYYHMDQRNRQGLRDLVNSGVTIQIMSVPEYCYCWRNFVNFPPGQEAHWPRYQPQWMALYELELHCIILSLPPCLKISRRCQKQLTFFGLTLQNCHYQAIPPHILLATGLVLPFVPWR

SEQ ID NO: 1234 - protein, 236 aa, unidentified
MASETGPSAGDPTLRRRIEPWEFEVFFDPRELRKETCLLYEIQWGTSHRRWRKSGKNTTNHAEVNFIEKLTSERQFCPSVRCSITWFLSWSPCWECSQAIQEFLSQHPNVTLVIYVARLYYHMDQRNRQGLRDLVNSGVTIQIMSVPEYCYCWRNFVNFPPGQEAHWPRYQPQWMALYELELHCIILSLPPCLKISRRCQKQLTFFGLTLQNCHYQAIPPHILLATGLVLPFVPWR

SEQ ID NO: 1235 - protein, 236 aa, Una virus
MASETGPSAGDPTLRRRIEPWEFEVFFDPRELARETCLLYEIQWGTSHRRWRKSGKNTTNHAEVNFIEKLTSERQFCPSVRCSITWFLSWSPCWECSQAIQEFLSQHPNVTLVIYVARLYYAMDQRNRQGLRDLVNSGVTIQIMSVPEYCYCWRNFVNFPPGQEAHWPRYQPQWMALYELELHCIILSLPPCLKISRRCQKQLTFFGLTLQNCHYQAIPPHILLATGLVLPFVPWR

SEQ ID NO: 1236 - protein, 236 aa, unidentified
MASETGPSAGDPTLRRRIEPWEFEVFFDPRELRAETCLLYEIQWGTSHRRWRKSGKNTTNHAEVNFIEKLTSERQFCPSVRCSITWFLSWSPCWECSQAIQEFLSQHPNVTLVIYVARLYYAMDQRNRQGLRDLVNSGVTIQIMSVPEYCYCWRNFVNFPPGQEAHWPRYQPQWMALYELELHCIILSLPPCLKISRRCQKQLTFFGLTLQNCHYQAIPPHILLATGLVLPFVPWR

SEQ ID NO: 1237 - protein, 236 aa, unidentified
MASETGPSAGDPTLRRRIEPWEFEVFFDPRELRRETCLLYEIQWGTSHRRWAKSGKNTTNHAEVNFIEKLTSERQFCPSVRCSITWFLSWSPCWECSQAIQEFLSQHPNVTLVIYVARLYYHMDQRNRQGLRDLVNSGVTIQIMSVPEYCYCWRNFVNFPPGQEAHWPRYQPQWMALYELELHCIILSLPPCLKISRRCQKQLTFFGLTLQNCHYQAIPPHILLATGLVLPFVPWR

SEQ ID NO: 1238 - protein, 236 aa, unidentified
MASETGPSAGDPTLRRRIEPWEFEVFFDPRELRRETCLLYEIQWGTSHRRWAKSGKNTTNHAEVNFIEKLTSERQFCPSVRCSITWFLSWSPCWECSQAIQEFLSQHPNVTLVIYVARLYYAMDQRNRQGLRDLVNSGVTIQIMSVPEYCYCWRNFVNFPPGQEAHWPRYQPQWMALYELELHCIILSLPPCLKISRRCQKQLTFFGLTLQNCHYQAIPPHILLATGLVLPFVPWR

SEQ ID NO: 1239 - protein, 236 aa, unidentified
MASETGPSAGDPTLRRRIEPWEFEVFFDPRELRRETCLLYEIQWGTSHRRWRKSGKGTTNHAEVNFIEKLTSERQFCPSVRCSITWFLSWSPCWECSQAIQEFLSQHPNVTLVIYVARLYYHMDQRNRQGLRDLVNSGVTIQIMSVPEYCYCWRNFVNFPPGQEAHWPRYQPQWMALYELELHCIILSLPPCLKISRRCQKQLTFFGLTLQNCHYQAIPPHILLATGLVLPFVPWR

SEQ ID NO: 1240 - protein, 236 aa, unidentified
MASETGPSAGDPTLRRRIEPWEFEVFFDPRELRRETCLLYEIQWGTSHRRWRKSGKGTTNHAEVNFIEKLTSERQFCPSVRCSITWFLSWSPCWECSQAIQEFLSQHPNVTLVIYVARLYYAMDQRNRQGLRDLVNSGVTIQIMSVPEYCYCWRNFVNFPPGQEAHWPRYQPQWMALYELELHCIILSLPPCLKISRRCQKQLTFFGLTLQNCHYQAIPPHILLATGLVLPFVPWR

SEQ ID NO: 1241 - protein, 200 aa, unidentified
MFDYTTDKEFLRTLLWTGIEWPKRTYLIAVVKTAYGKEIFKKGFKNKPKDGHAEEIMLNDYDFRKTVAGDRYIEIILTLNYSPCSECAKILRTFYESHKKKITKFIIQFSQIYDYDPLYKEGLRNLYEAGVTLQAMNPGSWGEVGIDLNVMGAKDRGRITERDKNTDDELYSVLFPYKKEQVQDTSVDELSSRFNKQIKF

SEQ ID NO: 1242 - protein, 211 aa, unidentified
MATTLEESKDFIENLFTTGIKGTVWPKKTYLIVVIKNRRGEVIFRKKYQTLPNRCGFLPNENHTERQMLDDQEFKECLETGEVCEIILTSNYSPCKDCAKDLKNFYEECTELRLTIQFSHPYATNDGKDHLKGLKNLDRAGITLEAMTDESRLDVLRNEEHLLDMVLKFMFDLDPRRVEERDVATKEKLKKLRRTDSEAERFAAKMKNLNL

SEQ ID NO: 1243 - protein, 211 aa, unidentified
MATTLEESKDFIENLFTTGIKGTVWPKKTYLIVVIKNRRGEVIFRKKYQTLPNRCGFLPNENHTERQMLDDQEFKECLETGEVCEIILTSNYSPCKDCAKDLKNFYEECTELRLTIQFSHPYQTNDGKDHLKGLKNLDRAGITLEAMTDESRLDVLRNEEHLLDMVLKFMFDLDPRRVEERDVATKEKLKKLRRTDSEAERFAAKMKNLNL

SEQ ID NO: 1244 - protein, 246 aa, unidentified
MSSDVVFCWSTGPSAGDTTLRRRIEPWEFKDSFDPHQLRKETRLLSEVWWGKSSRPWRESRQNATHHVEMNFIEKFTSERHLRPHVCCSITWFLSWSPCWECAKAIREFVSQHPKVRLVIYVARLYFCEDRKAEPEGLRALVAGGVHVQIMSDSDYGYCWRNFVNYPPGQEAAWPRFLPVWTALYALELSCILLSLPPCLRISRRRQNQLTFFQVILKNCHYRAIPPLVLSAAGMMHPSVAWCWAE

SEQ ID NO: 1245 - protein, 247 aa, unidentified
MSSDVVFCWSTGPSAGDTTLRRRIEPWEFKDSFDPHQLRKETRLLSEVWWGKSSRPWRESRQNATHHVEMNFIEKFTSERHLRPHVCCSITWFLSWSPCWECAKAIREFVSQHPKVRLVIYVARLYLYYIQKEENQNGLRALVAGGVHVQIMSDSDYGYCWRNFVNYPPGQEAAWPRFLPVWTALYALELSCILLSLPPCLRISRRRQNQLTFFQVILKNCHYRAIPPLVLSAAGMMHPSVAWCWAE

SEQ ID NO: 1246 - protein, 245 aa, unidentified
MSSDVVFCWSTGPSAGDTTLRRRIEPWEFKDSFDPHQLRKETRLLSEVWWGKSSRPWRESRQNATHHVEMNFIEKFTSERHLRPHVCCSITWFLSWSPCWECAKAIREFVSQHPKVRLVIYVARLYFHLDEQNRQGLRALVAGGVHVQIMSDSDYGYCWRNFVNYPPGQEAAWPRFLPVWTALYALELSCILLSLPPCLRISRRRQNQLTFFQVILKNCHYRAIPPLVLSAAGMMHPSVAWCWAE

SEQ ID NO: 1247 - protein, 245 aa, unidentified
MSSDVVFCWSTGPSAGDTTLRRRIEPWEFKDSFDPHQLRKETRLLSEVWWGKSSRPWRESRQNATHHVEMNFIEKFTSERHLRPHVCCSITWFLSWSPCWECAKAIREFVSQHPKVRLVIYVARLYHHLDEQNRQGLRALVAGGVHVQIMSDSDYGYCWRNFVNYPPGQEAAWPRFLPVWTALYALELSCILLSLPPCLRISRRRQNQLTFFQVILKNCHYRAIPPLVLSAAGMMHPSVAWCWAE

SEQ ID NO: 1248 - protein, 245 aa, unidentified
MSSDVVFCWSTGPSAGDTTLRRRIEPWEFKDSFDPHQLRKETRLLSEVWWGKSSRPWRESRQNATHHVEMNFIEKFTSERHLRPHVCCSITWFLSWSPCWECAKAIREFVSQHPKVRLVIYVARLYQHLDEQNRQGLRALVAGGVHVQIMSDSDYGYCWRNFVNYPPGQEAAWPRFLPVWTALYALELSCILLSLPPCLRISRRRQNQLTFFQVILKNCHYRAIPPLVLSAAGMMHPSVAWCWAE

SEQ ID NO: 1249 - protein, 245 aa, unidentified
MSSDVVFCWSTGPSAGDTTLRRRIEPWEFKDSFDPHQLRKETRLLSEVWWGKSSRPWRESRQNATHHVEMNFIEKFTSERHLRPHVCCSITWFLSWSPCWECAKAIREFVSQHPKVRLVIYVARLYAHLDEQNRQGLRALVAGGVHVQIMSDSDYGYCWRNFVNYPPGQEAAWPRFLPVWTALYALELSCILLSLPPCLRISRRRQNQLTFFQVILKNCHYRAIPPLVLSAAGMMHPSVAWCWAE

SEQ ID NO: 1250 - protein, 245 aa, unidentified
MSSDVVFCWSTGPSAGDTTLRRRIEPWEFKDSFDPHQLRKETRLLSEVWWGKSSRPWRESRQNATHHVEMNFIEKFTSERHLRPHVCCSITWFLSWSPCWECAKAIREFVSQHPKVRLVIYVARLYDHLDEQNRQGLRALVAGGVHVQIMSDSDYGYCWRNFVNYPPGQEAAWPRFLPVWTALYALELSCILLSLPPCLRISRRRQNQLTFFQVILKNCHYRAIPPLVLSAAGMMHPSVAWCWAE

SEQ ID NO: 1251 - protein, 245 aa, unidentified
MSSDVVFCWSTGPSAGDTTLRRRIEPWEFKDSFDPHQLAKETRLLSEVWWGKSSRPWRESRQNATHHVEMNFIEKFTSERHLRPHVCCSITWFLSWSPCWECAKAIREFVSQHPKVRLVIYVARLYWHLDEQNRQGLRALVAGGVHVQIMSDSDYGYCWRNFVNYPPGQEAAWPRFLPVWTALYALELSCILLSLPPCLRISRRRQNQLTFFQVILKNCHYRAIPPLVLSAAGMMHPSVAWCWAE

SEQ ID NO: 1252 - protein, 245 aa, unidentified
MSSDVVFCWSTGPSAGDTTLRRRIEPWEFKDSFDPHQLRAETRLLSEVWWGKSSRPWRESRQNATHHVEMNFIEKFTSERHLRPHVCCSITWFLSWSPCWECAKAIREFVSQHPKVRLVIYVARLYWHLDEQNRQGLRALVAGGVHVQIMSDSDYGYCWRNFVNYPPGQEAAWPRFLPVWTALYALELSCILLSLPPCLRISRRRQNQLTFFQVILKNCHYRAIPPLVLSAAGMMHPSVAWCWAE

SEQ ID NO: 1253 - protein, 245 aa, unidentified
MSSDVVFCWSTGPSAGDTTLRRRIEPWEFKDSFDPHQLRKETRLLSEVWWGKSSRPWRESRQNATHHVEMNFIEKFTSERHLRPHVCCSITWFLSWSPCWECAKAIREFVSQHPKVRLVIYVARLYWALDEQNRQGLRALVAGGVHVQIMSDSDYGYCWRNFVNYPPGQEAAWPRFLPVWTALYALELSCILLSLPPCLRISRRRQNQLTFFQVILKNCHYRAIPPLVLSAAGMMHPSVAWCWAE

SEQ ID NO: 1254 - protein, 245 aa, unidentified
MSSDVVFCWSTGPSAGDTTLRRRIEPWEFKDSFDPHQLRKETRLLSEVWWGKSSRPWRESRQGATHHVEMNFIEKFTSERHLRPHVCCSITWFLSWSPCWECAKAIREFVSQHPKVRLVIYVARLYWHLDEQNRQGLRALVAGGVHVQIMSDSDYGYCWRNFVNYPPGQEAAWPRFLPVWTALYALELSCILLSLPPCLRISRRRQNQLTFFQVILKNCHYRAIPPLVLSAAGMMHPSVAWCWAE

SEQ ID NO: 1255 - protein, 245 aa, unidentified
MSSDVVFCWSTGPSAGDTTLRRRIEPWEFKDSFDPHQLRKETRLLSEVWWGKSSRPWAESRQNATHHVEMNFIEKFTSERHLRPHVCCSITWFLSWSPCWECAKAIREFVSQHPKVRLVIYVARLYWHLDEQNRQGLRALVAGGVHVQIMSDSDYGYCWRNFVNYPPGQEAAWPRFLPVWTALYALELSCILLSLPPCLRISRRRQNQLTFFQVILKNCHYRAIPPLVLSAAGMMHPSVAWCWAE

SEQ ID NO: 1256 - protein, 229 aa, unidentified
MSSETGPAVVDPTLRRRIEPQEFEVFFDPRELRKETCLLYEISWGGRRSIWRHTSRNTDKHVEINFIEKLTSQRSFRPSARCSITWFLSWSPCGECSKAITEFLSQHPNVTLFIYVARLYFCEDRKAEPEGLRNLICRGVTVQIMTEQEYCYCWKNFVNYPPSNEVYWPRFPNVWMRLYMLELLCIILGLPPCLRILRRNQRHDTLFTLVFQRCHYQRIPPPIIWARGM

SEQ ID NO: 1257 - protein, 228 aa, unidentified
MSSETGPAVVDPTLRRRIEPQEFEVFFDPRELRKETCLLYEISWGGRRSIWRHTSRNTDKHVEINFIEKLTSQRSFRPSARCSITWFLSWSPCGECSKAITEFLSQHPNVTLFIYVARLYYIQKEENQNGLRNLICRGVTVQIMTEQEYCYCWKNFVNYPPSNEVYWPRFPNVWMRLYMLELLCIILGLPPCLRILRRNQRHDTLFTLVFQRCHYQRIPPPIIWARGM

SEQ ID NO: 1258 - protein, 228 aa, unidentified
MSSETGPAVVDPTLRRRIEPQEFEVFFDPRELRKETCLLYEISWGGRRSIWRHTSRNTDKHVEINFIEKLTSQRSFRPSARCSITWFLSWSPCGECSKAITEFLSQHPNVTLFIYVARLYFHMDPGNRQGLRNLICRGVTVQIMTEQEYCYCWKNFVNYPPSNEVYWPRFPNVWMRLYMLELLCIILGLPPCLRILRRNQRHDTLFTLVFQRCHYQRIPPPIIWARGM

SEQ ID NO: 1259 - protein, 228 aa, unidentified
MSSETGPAVVDPTLRRRIEPQEFEVFFDPRELRKETCLLYEISWGGRRSIWRHTSRNTDKHVEINFIEKLTSQRSFRPSARCSITWFLSWSPCGECSKAITEFLSQHPNVTLFIYVARLYYHMDPGNRQGLRNLICRGVTVQIMTEQEYCYCWKNFVNYPPSNEVYWPRFPNVWMRLYMLELLCIILGLPPCLRILRRNQRHDTLFTLVFQRCHYQRIPPPIIWARGM

SEQ ID NO: 1260 - protein, 228 aa, unidentified
MSSETGPAVVDPTLRRRIEPQEFEVFFDPRELRKETCLLYEISWGGRRSIWRHTSRNTDKHVEINFIEKLTSQRSFRPSARCSITWFLSWSPCGECSKAITEFLSQHPNVTLFIYVARLYQHMDPGNRQGLRNLICRGVTVQIMTEQEYCYCWKNFVNYPPSNEVYWPRFPNVWMRLYMLELLCIILGLPPCLRILRRNQRHDTLFTLVFQRCHYQRIPPPIIWARGM

SEQ ID NO: 1261 - protein, 228 aa, unidentified
MSSETGPAVVDPTLRRRIEPQEFEVFFDPRELRKETCLLYEISWGGRRSIWRHTSRNTDKHVEINFIEKLTSQRSFRPSARCSITWFLSWSPCGECSKAITEFLSQHPNVTLFIYVARLYAHMDPGNRQGLRNLICRGVTVQIMTEQEYCYCWKNFVNYPPSNEVYWPRFPNVWMRLYMLELLCIILGLPPCLRILRRNQRHDTLFTLVFQRCHYQRIPPPIIWARGM

SEQ ID NO: 1262 - protein, 228 aa, unidentified
MSSETGPAVVDPTLRRRIEPQEFEVFFDPRELRKETCLLYEISWGGRRSIWRHTSRNTDKHVEINFIEKLTSQRSFRPSARCSITWFLSWSPCGECSKAITEFLSQHPNVTLFIYVARLYDHMDPGNRQGLRNLICRGVTVQIMTEQEYCYCWKNFVNYPPSNEVYWPRFPNVWMRLYMLELLCIILGLPPCLRILRRNQRHDTLFTLVFQRCHYQRIPPPIIWARGM

SEQ ID NO: 1263 - protein, 228 aa, unidentified
MSSETGPAVVDPTLRRRIEPQEFEVFFDPRELRKETCLLYEISWGGRRSIWRHTSRNTDKHVEINFIEKLTSQRSFRPSARCSITWFLSWSPCGECSKAITEFLSQHPNVTLFIYVARLYWHMDPGNRQGLRNLICRGVTVQIMTEQEYCYCWKNFVNYPPSNEVYWPRFPNVWMRLYMLELLCIILGLPPCLRILRRNQRHDTLFTLVFQRCHYQRIPPPIIWARGM

SEQ ID NO: 1264 - protein, 228 aa, unidentified
MSSETGPAVVDPTLRRRIEPQEFEVFFDPRELRKETCLLYEISWGGRRSIWRHTSRGTDKHVEINFIEKLTSQRSFRPSARCSITWFLSWSPCGECSKAITEFLSQHPNVTLFIYVARLYHHMDPGNRQGLRNLICRGVTVQIMTEQEYCYCWKNFVNYPPSNEVYWPRFPNVWMRLYMLELLCIILGLPPCLRILRRNQRHDTLFTLVFQRCHYQRIPPPIIWARGM

SEQ ID NO: 1265 - protein, 228 aa, unidentified
MSSETGPAVVDPTLRRRIEPQEFEVFFDPRELAKETCLLYEISWGGRRSIWRHTSRNTDKHVEINFIEKLTSQRSFRPSARCSITWFLSWSPCGECSKAITEFLSQHPNVTLFIYVARLYHHMDPGNRQGLRNLICRGVTVQIMTEQEYCYCWKNFVNYPPSNEVYWPRFPNVWMRLYMLELLCIILGLPPCLRILRRNQRHDTLFTLVFQRCHYQRIPPPIIWARGM

SEQ ID NO: 1266 - protein, 228 aa, unidentified
MSSETGPAVVDPTLRRRIEPQEFEVFFDPRELRAETCLLYEISWGGRRSIWRHTSRNTDKHVEINFIEKLTSQRSFRPSARCSITWFLSWSPCGECSKAITEFLSQHPNVTLFIYVARLYHHMDPGNRQGLRNLICRGVTVQIMTEQEYCYCWKNFVNYPPSNEVYWPRFPNVWMRLYMLELLCIILGLPPCLRILRRNQRHDTLFTLVFQRCHYQRIPPPIIWARGM

SEQ ID NO: 1267 - protein, 228 aa, unidentified
MSSETGPAVVDPTLRRRIEPQEFEVFFDPRELRKETCLLYEISWGGRRSIWRHTSRNTDKHVEINFIEKLTSQRSFRPSARCSITWFLSWSPCGECSKAITEFLSQHPNVTLFIYVARLYHAMDPGNRQGLRNLICRGVTVQIMTEQEYCYCWKNFVNYPPSNEVYWPRFPNVWMRLYMLELLCIILGLPPCLRILRRNQRHDTLFTLVFQRCHYQRIPPPIIWARGM

SEQ ID NO: 1268 - protein, 228 aa, unidentified; identical to SEQ ID NO: 1261

SEQ ID NO: 1269 - protein, 228 aa, unidentified
MSSETGPAVVDPTLRRRIEPQEFEVFFDPRELRKETCLLYEISWGGRRSIWAHTSRNTDKHVEINFIEKLTSQRSFRPSARCSITWFLSWSPCGECSKAITEFLSQHPNVTLFIYVARLYHHMDPGNRQGLRNLICRGVTVQIMTEQEYCYCWKNFVNYPPSNEVYWPRFPNVWMRLYMLELLCIILGLPPCLRILRRNQRHDTLFTLVFQRCHYQRIPPPIIWARGM

SEQ ID NO: 1270 - protein, 224 aa, unidentified
MAEGGQDSAFEFMKTLLETKRRVNKPYYPNFTNLIADIKTKDGEVIWWKKYKSRNSHAEIQMLNDVEFKDEIGKVKDDKTKKVDIILTLNYSPCSECADKLKKFYEDNKSLIQKFTIRFSRLYRINVQENKDGLKDLDRAGITLEAMTPESWFDVLMTDKSWLESMSTDQKSSFETIMKKKDKFDRVMKLFGLNHDRVKKRDADTSEGLKKLIMEEVVEKTKSL

SEQ ID NO: 1271 - protein, 218 aa, unidentified
MAEGGQDSAFEFMKTLLETGIDDCWPNFTNLIADIKTKDGEVIWWKKYKSRNSHAEIQMLNDVEFKDEIGKVKDDKTKKVDIILTLNYSPCSECADKLKKFYEDNKSLIQKFTIRFSRLYRINVQENKDGLKDLDRAGITLEAMTPESWFDVLMTDKSWLESMSTDQKSSFETIMKKKDKFDRVMKLFGLNHDRVSQAIKRRLERIKSRSVDEKTKSL

SEQ ID NO: 1272 - protein, 221 aa, unidentified
MAEGGQDSAFEFMKTLLETGIDDCWRNFTNLIADIKTKDGEVIWWKKYKSRNSHAEIQMLNDVEFKDEIGKVKDDKTKKVDIILTLNYSPCSECADKLKKFYEDNKSLIQKFTIRFSRLYRINVQENKDGLKDLDRAGITLEAMTPESWFDVLMTDKSWLESMSTDQKSSFETIMKKKDKFDRVMKLFGLNHDRVKKRDADTSEGLKKLIMEEVVEKTKSL

SEQ ID NO: 1273 - protein, 221 aa, unidentified
MAEGGQDSAFEFMKTLLETGIDDCWANFTNLIADIKTKDGEVIWWKKYKSRNSHAEIQMLNDVEFKDEIGKVKDDKTKKVDIILTLNYSPCSECADKLKKFYEDNKSLIQKFTIRFSRLYRINVQENKDGLKDLDRAGITLEAMTPESWFDVLMTDKSWLESMSTDQKSSFETIMKKKDKFDRVMKLFGLNHDRVKKRDADTSEGLKKLIMEEVVEKTKSL

SEQ ID NO: 1274 - protein, 221 aa, unidentified
MAEGGQDSAFEFMKTLLETGIDDCWPRFTNLIADIKTKDGEVIWWKKYKSRNSHAEIQMLNDVEFKDEIGKVKDDKTKKVDIILTLNYSPCSECADKLKKFYEDNKSLIQKFTIRFSRLYRINVQENKDGLKDLDRAGITLEAMTPESWFDVLMTDKSWLESMSTDQKSSFETIMKKKDKFDRVMKLFGLNHDRVKKRDADTSEGLKKLIMEEVVEKTKSL

SEQ ID NO: 1275 - protein, 221 aa, unidentified
MAEGGQDSAFEFMKTLLETGIDDCWPAFTNLIADIKTKDGEVIWWKKYKSRNSHAEIQMLNDVEFKDEIGKVKDDKTKKVDIILTLNYSPCSECADKLKKFYEDNKSLIQKFTIRFSRLYRINVQENKDGLKDLDRAGITLEAMTPESWFDVLMTDKSWLESMSTDQKSSFETIMKKKDKFDRVMKLFGLNHDRVKKRDADTSEGLKKLIMEEVVEKTKSL

SEQ ID NO: 1276 - protein, 221 aa, unidentified
MAEGGQDSAFEFMKTLLETGIDDCWPNFTNLIADIKTKDGEVIAWKKYKSRNSHAEIQMLNDVEFKDEIGKVKDDKTKKVDIILTLNYSPCSECADKLKKFYEDNKSLIQKFTIRFSRLYRINVQENKDGLKDLDRAGITLEAMTPESWFDVLMTDKSWLESMSTDQKSSFETIMKKKDKFDRVMKLFGLNHDRVKKRDADTSEGLKKLIMEEVVEKTKSL

SEQ ID NO: 1277 - protein, 221 aa, unidentified
MAEGGQDSAFEFMKTLLETGIDDCWPNFTNLIADIKTKDGEVIWAKKYKSRNSHAEIQMLNDVEFKDEIGKVKDDKTKKVDIILTLNYSPCSECADKLKKFYEDNKSLIQKFTIRFSRLYRINVQENKDGLKDLDRAGITLEAMTPESWFDVLMTDKSWLESMSTDQKSSFETIMKKKDKFDRVMKLFGLNHDRVKKRDADTSEGLKKLIMEEVVEKTKSL

SEQ ID NO: 1278 - protein, 221 aa, unidentified
MAEGGQDSAFEFMKTLLETGIDDCWPNFTNLIADIKTKDGEVIWWKKYGSRNSHAEIQMLNDVEFKDEIGKVKDDKTKKVDIILTLNYSPCSECADKLKKFYEDNKSLIQKFTIRFSRLYRINVQENKDGLKDLDRAGITLEAMTPESWFDVLMTDKSWLESMSTDQKSSFETIMKKKDKFDRVMKLFGLNHDRVKKRDADTSEGLKKLIMEEVVEKTKSL

SEQ ID NO: 1279 - protein, 221 aa, unidentified
MAEGGQDSAFEFMKTLLETGIDDCWPNFTNLIADIKTKDGEVIWWKKYKGRNSHAEIQMLNDVEFKDEIGKVKDDKTKKVDIILTLNYSPCSECADKLKKFYEDNKSLIQKFTIRFSRLYRINVQENKDGLKDLDRAGITLEAMTPESWFDVLMTDKSWLESMSTDQKSSFETIMKKKDKFDRVMKLFGLNHDRVKKRDADTSEGLKKLIMEEVVEKTKSL

SEQ ID NO: 1280 - protein, 221 aa, unidentified
MAEGGQDSAFEFMKTLLETGIDDCWPNFTNLIADIKTKDGEVIWWKKYKSGNSHAEIQMLNDVEFKDEIGKVKDDKTKKVDIILTLNYSPCSECADKLKKFYEDNKSLIQKFTIRFSRLYRINVQENKDGLKDLDRAGITLEAMTPESWFDVLMTDKSWLESMSTDQKSSFETIMKKKDKFDRVMKLFGLNHDRVKKRDADTSEGLKKLIMEEVVEKTKSL

SEQ ID NO: 1281 - protein, 221 aa, unidentified
MAEGGQDSAFEFMKTLLETGIDDCWPNFTNLIADIKTKDGEVIWWKKYKSRNSHAEIQMLNDVEFKDEIGKVKDDKTKKVDIILTLNYSPCSECADKLKKFYEDNKSLIQKFTIRFSRLYAINVQENKDGLKDLDRAGITLEAMTPESWFDVLMTDKSWLESMSTDQKSSFETIMKKKDKFDRVMKLFGLNHDRVKKRDADTSEGLKKLIMEEVVEKTKSL

SEQ ID NO: 1282 - protein, 221 aa, unidentified
MAEGGQDSAFEFMKTLLETGIDDCWPNFTNLIADIKTKDGEVIWWKKYKSRNSHAEIQMLNDVEFKDEIGKVKDDKTKKVDIILTLNYSPCSECADKLKKFYEDNKSLIQKFTIRFSRLYRANVQENKDGLKDLDRAGITLEAMTPESWFDVLMTDKSWLESMSTDQKSSFETIMKKKDKFDRVMKLFGLNHDRVKKRDADTSEGLKKLIMEEVVEKTKSL

SEQ ID NO: 1283 - protein, 221 aa, unidentified
MAEGGQDSAFEFMKTLLETGIDDCWPNFTNLIADIKTKDGEVIWWKKYKSRNSHAEIQMLNDVEFKDEIGKVKDDKTKKVDIILTLNYSPCSECADKLKKFYEDNKSLIQKFTIRFSRLYRIAVQENKDGLKDLDRAGITLEAMTPESWFDVLMTDKSWLESMSTDQKSSFETIMKKKDKFDRVMKLFGLNHDRVKKRDADTSEGLKKLIMEEVVEKTKSL

SEQ ID NO: 1284 - protein, 221 aa, unidentified
MAEGGQDSAFEFMKTLLETGIDDCWPNFTNLIADIKTKDGEVIWWKKYKSRNSHAEIQMLNDVEFKDEIGKVKDDKTKKVDIILTLNFSPCSECADKLKKFYEDNKSLIQKFTIRFSRLYRINVQENKDGLKDLDRAGITLEAMTPESWFDVLMTDKSWLESMSTDQKSSFETIMKKKDKFDRVMKLFGLNHDRVKKRDADTSEGLKKLIMEEVVEKTKSL

SEQ ID NO: 1285 - protein, 221 aa, unidentified
MAEGGQDSAFEFMKTLLETGIDDCWPNFTNLIADIKTKDGEVIWWKKYKSRNSHAEIQMLNDVEFKDEIGKVKDDKTKKVDIILTLNYSPCSECADKLKKFYEDNKSLIQKFTIRFSRLFRINVQENKDGLKDLDRAGITLEAMTPESWFDVLMTDKSWLESMSTDQKSSFETIMKKKDKFDRVMKLFGLNHDRVKKRDADTSEGLKKLIMEEVVEKTKSL

SEQ ID NO: 1286 - protein, 201 aa, unidentified
MFDYTTDKEFLRTLLWTGIEWRKRTYLIAVVKTAYGKEIFKKGFKNKPKDGHAEEIMLNDYDFRKTVAGDRYIEIILTLNYSPCSECAKILRTFYESHKKKITKFIIQFSQLYYIQKEENQNGLRNLYEAGVTLQAMNPGSWGEVGIDLNVMGAKDRGRITERDKNTDDELYSVLFPYKKEQVQDTSVDELSSRFNKQIKF

SEQ ID NO: 1287 - protein, 201 aa, unidentified
MFDYTTDKEFLRTLLWTGIEWAKRTYLIAVVKTAYGKEIFKKGFKNKPKDGHAEEIMLNDYDFRKTVAGDRYIEIILTLNYSPCSECAKILRTFYESHKKKITKFIIQFSQLYYIQKEENQNGLRNLYEAGVTLQAMNPGSWGEVGIDLNVMGAKDRGRITERDKNTDDELYSVLFPYKKEQVQDTSVDELSSRFNKQIKF

SEQ ID NO: 1288 - protein, 201 aa, unidentified
MFDYTTDKEFLRTLLWTGIEWPARTYLIAVVKTAYGKEIFKKGFKNKPKDGHAEEIMLNDYDFRKTVAGDRYIEIILTLNYSPCSECAKILRTFYESHKKKITKFIIQFSQLYYIQKEENQNGLRNLYEAGVTLQAMNPGSWGEVGIDLNVMGAKDRGRITERDKNTDDELYSVLFPYKKEQVQDTSVDELSSRFNKQIKF

SEQ ID NO: 1289 - protein, 201 aa, unidentified
MFDYTTDKEFLRTLLWTGIEWPKRTYLIAVVKTAYGKEIFRKGFKNKPKDGHAEEIMLNDYDFRKTVAGDRYIEIILTLNYSPCSECAKILRTFYESHKKKITKFIIQFSQLYYIQKEENQNGLRNLYEAGVTLQAMNPGSWGEVGIDLNVMGAKDRGRITERDKNTDDELYSVLFPYKKEQVQDTSVDELSSRFNKQIKF

SEQ ID NO: 1290 - protein, 201 aa, unidentified
MFDYTTDKEFLRTLLWTGIEWPKRTYLIAVVKTAYGKEIFAKGFKNKPKDGHAEEIMLNDYDFRKTVAGDRYIEIILTLNYSPCSECAKILRTFYESHKKKITKFIIQFSQLYYIQKEENQNGLRNLYEAGVTLQAMNPGSWGEVGIDLNVMGAKDRGRITERDKNTDDELYSVLFPYKKEQVQDTSVDELSSRFNKQIKF

SEQ ID NO: 1291 - protein, 178 aa, unidentified
MFDYTTDKEFLRTLLWTGIEWPKRTYLIAVVKTAYGKEIFKKGFKNKPKDGHAEEIMLNDYDFRKTVAGDRYIEIILTLNYSPCSECAKILRTFYESHKKKITKFIIQFSQLYYIQKEENQNGLRNLYEAGVTLQAMNPGSWGEVGIDLNVMGAKDRGRITERDKNTDDELYSVLFPY

SEQ ID NO: 1292 - protein, 179 aa, unidentified
MFDYTTDKEFLRTLLWTGIEWPKRTYLIAVVKTAYGKEIFKKGFKNKPKDGHAEEIMLNDYDFRKTVAGDRYIEIILTLNYSPCSECAKILRTFYESHKKKITKFIIQFSQLYFCEDRKAEPEGLRNLYEAGVTLQAMNPGSWGEVGIDLNVMGAKDRGRITERDKNTDDELYSVLFPY

SEQ ID NO: 1293 - protein, 178 aa, unidentified
MFDYTTDKEFLRTLLWTGIEWPKRTYLIAVVKTAYGKEIFKKGFKNKPKDGHADEIMLNDYDFRKTVAGDRYIEIILTLNYSPCSECAKILRTFYESHKKKITKFIIQFSQLYYIQKEENQNGLRNLYEAGVTLQAMNPGSWGEVGIDLNVMGAKDRGRITERDKNTDDELYSVLFPY

SEQ ID NO: 1294 - protein, 201 aa, unidentified
MFDYTTDKEFLRTLLWTGIEWPKRTYLIAVVKTAYGKEIFKKGFKNKPKDGHAAEIMLNDYDFRKTVAGDRYIEIILTLNYSPCSECAKILRTFYESHKKKITKFIIQFSQLYYIQKEENQNGLRNLYEAGVTLQAMNPGSWGEVGIDLNVMGAKDRGRITERDKNTDDELYSVLFPYKKEQVQDTSVDELSSRFNKQIKF

SEQ ID NO: 1295 - protein, 201 aa, unidentified
MFDYTTDKEFLRTLLWTGIEWPKRTYLIAVVKTAYGKEIFKKGFKNKPKDGHAEAIMLNDYDFRKTVAGDRYIEIILTLNYSPCSECAKILRTFYESHKKKITKFIIQFSQLYYIQKEENQNGLRNLYEAGVTLQAMNPGSWGEVGIDLNVMGAKDRGRITERDKNTDDELYSVLFPYKKEQVQDTSVDELSSRFNKQIKF

SEQ ID NO: 1296 - protein, 201 aa, unidentified
MFDYTTDKEFLRTLLWTGIEWPKRTYLIAVVKTAYGKEIFKKGFKNKPKDGHAAAIMLNDYDFRKTVAGDRYIEIILTLNYSPCSECAKILRTFYESHKKKITKFIIQFSQLYYIQKEENQNGLRNLYEAGVTLQAMNPGSWGEVGIDLNVMGAKDRGRITERDKNTDDELYSVLFPYKKEQVQDTSVDELSSRFNKQIKF

SEQ ID NO: 1297 - protein, 211 aa, unidentified
MPGEIEIEHHDSKIRHMYETVLDHRHGWNAAMTTNLICRINSEDTPLIIQNAHGNKHAEELLLDELNQRDKSLLTTITIYTNNSPCSNKGHDCARQLIKFLNENTHVIMVFYVTNLYKIRRVSCKSEEHYSLVSQADFKANNTGLKDMMKHGRCVVSAFSYAVWVELLNIAPVSEVFKSQLLARYRTILDTNDRSREEEDNRIRSDLAYIR

SEQ ID NO: 1298 - protein, 211 aa, unidentified
MPGEIEIEHHDSKIRHMYETVLDHRHGWNRAMTTNLICRINSEDTPLIIQNAHGNKHAEELLLDELNQRDKSLLTTITIYTNNSPCSNKGHDCARQLIKFLNENTHVIMVFYVTNLYKIRRVSCKSEEHYSLVSQADFKANNTGLKDMMKHGRCVVSAFSYAVWVELLNIAPVSEVFKSQLLARYRTILDTNDRSREEEDNRIRSDLAYIR

SEQ ID NO: 1299 - protein, 211 aa, unidentified
MPGEIEIEHHDSKIRHMYETVLDHRHGWNKAATTNLICRINSEDTPLIIQNAHGNKHAEELLLDELNQRDKSLLTTITIYTNNSPCSNKGHDCARQLIKFLNENTHVIMVFYVTNLYKIRRVSCKSEEHYSLVSQADFKANNTGLKDMMKHGRCVVSAFSYAVWVELLNIAPVSEVFKSQLLARYRTILDTNDRSREEEDNRIRSDLAYIR

SEQ ID NO: 1300 - protein, 211 aa, unidentified
MPGEIEIEHHDSKIRHMYETVLDHRHGWNKAKTTNLICRINSEDTPLIIQNAHGNKHAEELLLDELNQRDKSLLTTITIYTNNSPCSNKGHDCARQLIKFLNENTHVIMVFYVTNLYKIRRVSCKSEEHYSLVSQADFKANNTGLKDMMKHGRCVVSAFSYAVWVELLNIAPVSEVFKSQLLARYRTILDTNDRSREEEDNRIRSDLAYIR

SEQ ID NO: 1301 - protein, 211 aa, unidentified
MPGEIEIEHHDSKIRHMYETVLDHRHGWNKAMTTNLICRINSEDTPLIIQNAHGNKHAEELLLDELNQRDKSLLTTITIYTNNSPCSNKGHDCARQLIKFLNENTHVIMVFYVTNLAKIRRVSCKSEEHYSLVSQADFKANNTGLKDMMKHGRCVVSAFSYAVWVELLNIAPVSEVFKSQLLARYRTILDTNDRSREEEDNRIRSDLAYIR

SEQ ID NO: 1302 - protein, 211 aa, unidentified
MPGEIEIEHHDSKIRHMYETVLDHRHGWNKAMTTNLICRINSEDTPLIIQNAHGNKHAEELLLDELNQRDKSLLTTITIYTNNSPCSNKGHDCARQLIKFLNENTHVIMVFYVTNLYAIRRVSCKSEEHYSLVSQADFKANNTGLKDMMKHGRCVVSAFSYAVWVELLNIAPVSEVFKSQLLARYRTILDTNDRSREEEDNRIRSDLAYIR

SEQ ID NO: 1303 - protein, 211 aa, unidentified
MPGEIEIEHHDSKIRHMYETVLDHRHGWNKAMTTNLICRINSEDTPLIIQNAHGNKHAEELLLDELNQRDKSLLTTITIYTNNSPCSNKGHDCARQLIKFLNENTHVIMVFYVTNLYKARRVSCKSEEHYSLVSQADFKANNTGLKDMMKHGRCVVSAFSYAVWVELLNIAPVSEVFKSQLLARYRTILDTNDRSREEEDNRIRSDLAYIR

SEQ ID NO: 1304 - protein, 211 aa, unidentified
MPGEIEIEHHDSKIRHMYETVLDHRHGWNKAMTTNLICRINSEDTPLIIQNAHGNKHAEELLLDELNQRDKSLLTTITIYTNNSPCSNKGHDCARQLIKFLNENTHVIMVFYVTNLYKHRRVSCKSEEHYSLVSQADFKANNTGLKDMMKHGRCVVSAFSYAVWVELLNIAPVSEVFKSQLLARYRTILDTNDRSREEEDNRIRSDLAYIR

SEQ ID NO: 1305 - protein, 211 aa, unidentified
MPGEIEIEHHDSKIRHMYETVLDHRHGWNKAMTTNLICRINSEDTPLIIQNAHGNKHAEELLLDELNQRDKSLLTTITIYTNNSPCSNKGHDCARQLIKFLNENTHVIMVFYVTNLYKIARVSCKSEEHYSLVSQADFKANNTGLKDMMKHGRCVVSAFSYAVWVELLNIAPVSEVFKSQLLARYRTILDTNDRSREEEDNRIRSDLAYIR

SEQ ID NO: 1306 - protein, 211 aa, unidentified
MPGEIEIEHHDSKIRHMYETVLDHRHGWNKAMTTNLICRINSEDTPLIIQNAHGNKHAEELLLDELNQRDKSLLTTITIYTNNSPCSNKGHDCARQLIKFLNENTHVIMVFYVTNLYKIRAVSCKSEEHYSLVSQADFKANNTGLKDMMKHGRCVVSAFSYAVWVELLNIAPVSEVFKSQLLARYRTILDTNDRSREEEDNRIRSDLAYIR

SEQ ID NO: 1307 - protein, 211 aa, unidentified
MPGEIEIEHHDSKIRHMYETVLDHRHGWNKAMTTNLICRINSEDTALIIQNAHGNKHAEELLLDELNQRDKSLLTTITIYTNNSPCSNKGHDCARQLIKFLNENTHVIMVFYVTNLYKIRRVSCKSEEHYSLVSQADFKANNTGLKDMMKHGRCVVSAFSYAVWVELLNIAPVSEVFKSQLLARYRTILDTNDRSREEEDNRIRSDLAYIR

SEQ ID NO: 1308 - protein, 211 aa, unidentified
MPGEIEIEHHDSKIRHMYETVLDHRHGWNKAMTTNLICRINSEDTRLIIQNAHGNKHAEELLLDELNQRDKSLLTTITIYTNNSPCSNKGHDCARQLIKFLNENTHVIMVFYVTNLYKIRRVSCKSEEHYSLVSQADFKANNTGLKDMMKHGRCVVSAFSYAVWVELLNIAPVSEVFKSQLLARYRTILDTNDRSREEEDNRIRSDLAYIR

SEQ ID NO: 1309 - protein, 211 aa, unidentified
MPGEIEIEHHDSKIRHMYETVLDHRHGWAKAMTTNLICRINSEDTPLIIQNAHGNKHAEELLLDELNQRDKSLLTTITIYTNNSPCSNKGHDCARQLIKFLNENTHVIMVFYVTNLYKIRRVSCKSEEHYSLVSQADFKANNTGLKDMMKHGRCVVSAFSYAVWVELLNIAPVSEVFKSQLLARYRTILDTNDRSREEEDNRIRSDLAYIR

SEQ ID NO: 1310 - protein, 194 aa, unidentified
MPGEIEIEHHDSKIRHMYETVLDHRHGWNKAMTTNLICRINSEDTPLIIQNAHGNKHAEELLLDELNQRDKSLLTTITIYTNNSPCSNKGHDCARQLIKFLNENTHVIMVFYVTRLYYTEFKANNTGLKDMMKHGRCVVSAFSYAVWVELLNIAPVSEVFKSQLLARYRTILDTNDRSREEEDNRIRSDLAYIR

SEQ ID NO: 1311 - protein, 212 aa, unidentified
MPGEIEIEHHDSKIRHMYETVLDHRHGWNKAMTTNLICRINSEDTPLIIQNAHGNKHAEELLLDELNQRDKSLLTTITIYTNNSPCSNKGHDCARQLIKFLNENTHVIMVFYVTGLYPGAGEAEGERGAATRPEDLAELKANNTGLKDMMKHGRCVVSAFSYAVWVELLNIAPVSEVFKSQLLARYRTILDTNDRSREEEDNRIRSDLAYIR

SEQ ID NO: 1312 - protein, 183 aa, unidentified
MYKKKLRGMYMSKKAFKYHFDPRESPAATYLLCVIQWGCNGLPWIHWVKNGRSHAERYFLQKVFKMRRSNNNINCSITLYLSWSPCRNCCYEMQYFLKKHPNVNICIYLARLYYTEDEEICKALKDLSEKKVIISVMKIEDYIYCWKTFVSGNAAAGSWFKDFESQINKNHFQLKRILEVSPL

SEQ ID NO: 1313 - protein, 183 aa, unidentified
MYKKKLRGMYMSKKAFKYHFDPRESPRATYLLCVIQWGCNGLPWIHWVKGGRSHAERYFLQKVFKMRRSNNNINCSITLYLSWSPCRNCCYEMQYFLKKHPNVNICIYLARLYYTEDEEICKALKDLSEKKVIISVMKIEDYIYCWKTFVSGNAAAGSWFKDFESQINKNHFQLKRILEVSPL

SEQ ID NO: 1314 - protein, 221 aa, unidentified
MAEGGQDSAFEFMKTLLETGIDDCWPAFTNLIADIKTKDGEVIWWKKYKSRNSHAEIQMLNDVEFKDEIGKVKDDKTKKVDIILTLNYSPCSECADKLKKFYEDNKSLIQKFTIRFSRLYYTEVQENKDGLKDLDRAGITLEAMTPESWFDVLMTDKSWLESMSTDQKSSFETIMKKKDKFDRVMKLFGLNHDRVKKRDADTSEGLKKLIMEEVVEKTKSL

SEQ ID NO: 1315 - protein, 241 aa, unidentified
MAEGGQDSAFEFMKTLLETGIDDCWPAFTNLIADIKTKDGEVIWWKKYKSRNSHAEIQMLNDVEFKDEIGKVKDDKTKKVDIILTLNYSPCSECADKLKKFYEDNKSLIQKFTIRFSGLYPGAGEAEGERGAATRPEDLAELNVQENKDGLKDLDRAGITLEAMTPESWFDVLMTDKSWLESMSTDQKSSFETIMKKKDKFDRVMKLFGLNHDRVKKRDADTSEGLKKLIMEEVVEKTKSL

SEQ ID NO: 1316 - DNA, 41 bp, unidentified
  source 1..41: mol_type = other DNA
attattattattagcatatttatttatttatttatttattt

SEQ ID NO: 1317 - DNA, 41 bp, unidentified
  source 1..41: mol_type = other DNA
attattattattaccatatttatttatttatttatttattt

SEQ ID NO: 1318 - DNA, 39 bp, unidentified
  source 1..39: mol_type = other DNA
attattattattaacatttatttatttatttatttattt

SEQ ID NO: 1319 - DNA, 41 bp, synthetic construct
  source 1..41: mol_type = other DNA
attattattattatcatatttatttatttatttatttattt

SEQ ID NO: 1320 - DNA, 80 bp, unidentified
  source 1..80: mol_type = other DNA
  modified_base 30: mod_base = OTHER; note = cyanine5.5
attattattattagcattattattattatattattattattagacattattattattatattattattattatattatta

SEQ ID NO: 1321 - DNA, 80 bp, unidentified
  source 1..80: mol_type = other DNA
attattattattatcattattattattatattattattattagccattattattattatattattattattatattatta

SEQ ID NO: 1322 - protein, 1481 aa, unidentified
MPGEIEIEHHDSKIRHMYETVLDHRHGWNKAMTTNLICRINSEDTPLIIQNAHGNKHAEELLLDELNQRDKSLLTTITIYTNNSPCSNKGHDCARQLIKFLNENTHVIMVFYVTNLYKIRRVSCKSEEHYSLVSQADFKANNTGLKDMMKHGRCVVSAFSYAVWVELLNIAPVSEVFKSQLLARYRTILDTNDRSREEEDNRIRSDLAYIRSACSGSETPGTSESATPESMSTDMKNYRIGVAVGDRSVGLAAIEFDDDGLPIQKLALVTFRHDGGLDPTKNKTPMSRKETRGIARRTMRMNRERKRRLRNLDNVLENLGYSVPEGPEPETYEAWTSRALLASIKLASADELNEHLVRAVRHMARHRGWANPWWSLDQLEKASQEPSETFEIILARARELFGEKVPANPTLGMLGALAANNEVLLRPRDEKKRKTGYVRGTPLMFAQVRQGDQLAELRRICEVQGIEDQYEALRLGVFDHKHPYVPKERVGKDPLNPSTNRTIRASLEFQEFRILDSVANLRVRIGSRAKRELTEAEYDAAVEFLMDYADKEQPSWADVAEKIGVPGNRLVAPVLEDVQQKTAPYDRSSAAFEKAMGKKTEARQWWESTDDDQLRSLLIAFLVDATNDTEEAAAEAGLSELYKSWPAEEREALSNIDFEKGRVAYSQETLSKLSEYMHEYRVGLHEARKAVFGVDDTWRPPLDKLEEPTGQPAVDRVLTILRRFVLDCERQWGRPRAITVEHTRTGLMGPTQRQKILNEQKKNRADNERIRDELRESGVDNPSRAEVRRHLIVQEQECQCLYCGTMITTTTSELDHIVPRAGGGSSRRENLAAVCRACNAKKKRELFYAWAGPVKSQETIERVRQLKAFKDSKKAKMFKNQIRRLNQTEADEPIDERSLASTSYAAVAVRERLEQHFNEGLALDDKSRVVLDVYAGAVTRESRRAGGIDERILLRGERDKNRFDVRHHAVDAAVMTLLNRSVALTLEQRSQLRRTFYEQGLDKLDRNQLKPEEDWRDFTGLAPASQEKFLEWRKAATILGDLLAEAIEDDSIAVVSPLRLRPQNGSVHLETISAVKKQTLGSDWPADAVKRIVDPEIYLAMKDALGKLKELPEDSARSLELPDGRFVEADDEVLFFPENAASILTPRGVAEIGGSIHHARLYGWLTKKGELKVGMLRVYGAEFPWLMRESGSRNVLSMPIHRGSQSFRDMQDTTRKAVESGEAVEFAWITQNDELEFDPDDYIAHGGKDELRQFLGFMPECRWRVDGFKKNYQIRIRPAMLSREQLPSDIQRRLESKTLTKNESLLLKALDTGLVVAIGGLLPLETLKVIRRNNLGFPRWRGNGNLPTSFEVRSSALRALGVEGSGGSSMSKTIKDLEEFAAEKLGYDIVFQESISMEPQEVEHLITTDEKSVLVNSTYDDNKEITISMISTPHPEYRPIALIIQDMEGEVQRKELGSGGSPKKKRKVGGSPKKKRKVGSG

SEQ ID NO: 1323 - protein, 1491 aa, unidentified
MAEGGQDSAFEFMKTLLETGIDDCWPAFTNLIADIKTKDGEVIWWKKYKSRNSHAEIQMLNDVEFKDEIGKVKDDKTKKVDIILTLNYSPCSECADKLKKFYEDNKSLIQKFTIRFSRLYRINVQENKDGLKDLDRAGITLEAMTPESWFDVLMTDKSWLESMSTDQKSSFETIMKKKDKFDRVMKLFGLNHDRVKKRDADTSEGLKKLIMEEVVEKTKSLSACSGSETPGTSESATPESMSTDMKNYRIGVAVGDRSVGLAAIEFDDDGLPIQKLALVTFRHDGGLDPTKNKTPMSRKETRGIARRTMRMNRERKRRLRNLDNVLENLGYSVPEGPEPETYEAWTSRALLASIKLASADELNEHLVRAVRHMARHRGWANPWWSLDQLEKASQEPSETFEIILARARELFGEKVPANPTLGMLGALAANNEVLLRPRDEKKRKTGYVRGTPLMFAQVRQGDQLAELRRICEVQGIEDQYEALRLGVFDHKHPYVPKERVGKDPLNPSTNRTIRASLEFQEFRILDSVANLRVRIGSRAKRELTEAEYDAAVEFLMDYADKEQPSWADVAEKIGVPGNRLVAPVLEDVQQKTAPYDRSSAAFEKAMGKKTEARQWWESTDDDQLRSLLIAFLVDATNDTEEAAAEAGLSELYKSWPAEEREALSNIDFEKGRVAYSQETLSKLSEYMHEYRVGLHEARKAVFGVDDTWRPPLDKLEEPTGQPAVDRVLTILRRFVLDCERQWGRPRAITVEHTRTGLMGPTQRQKILNEQKKNRADNERIRDELRESGVDNPSRAEVRRHLIVQEQECQCLYCGTMITTTTSELDHIVPRAGGGSSRRENLAAVCRACNAKKKRELFYAWAGPVKSQETIERVRQLKAFKDSKKAKMFKNQIRRLNQTEADEPIDERSLASTSYAAVAVRERLEQHFNEGLALDDKSRVVLDVYAGAVTRESRRAGGIDERILLRGERDKNRFDVRHHAVDAAVMTLLNRSVALTLEQRSQLRRTFYEQGLDKLDRNQLKPEEDWRDFTGLAPASQEKFLEWRKAATILGDLLAEAIEDDSIAVVSPLRLRPQNGSVHLETISAVKKQTLGSDWPADAVKRIVDPEIYLAMKDALGKLKELPEDSARSLELPDGRFVEADDEVLFFPENAASILTPRGVAEIGGSIHHARLYGWLTKKGELKVGMLRVYGAEFPWLMRESGSRNVLSMPIHRGSQSFRDMQDTTRKAVESGEAVEFAWITQNDELEFDPDDYIAHGGKDELRQFLGFMPECRWRVDGFKKNYQIRIRPAMLSREQLPSDIQRRLESKTLTKNESLLLKALDTGLVVAIGGLLPLETLKVIRRNNLGFPRWRGNGNLPTSFEVRSSALRALGVEGSGGSSMSKTIKDLEEFAAEKLGYDIVFQESISMEPQEVEHLITTDEKSVLVNSTYDDNKEITISMISTPHPEYRPIALIIQDMEGEVQRKELGSGGSPKKKRKVGGSPKKKRKVGSG

SEQ ID NO: 1324 - protein, 1506 aa, unidentified
MASETGPSAGDPTLRRRIEPWEFEVFFDPRELRRETCLLYEIQWGTSHRRWRKSGKNTTNHAEVNFIEKLTSERQFCPSVRCSITWFLSWSPCWECSQAIQEFLSQHPNVTLVIYVARLYYHMDQRNRQGLRDLVNSGVTIQIMSVPEYCYCWRNFVNFPPGQEAHWPRYQPQWMALYELELHCIILSLPPCLKISRRCQKQLTFFGLTLQNCHYQAIPPHILLATGLVLPFVPWRSACSGSETPGTSESATPESMSTDMKNYRIGVAVGDRSVGLAAIEFDDDGLPIQKLALVTFRHDGGLDPTKNKTPMSRKETRGIARRTMRMNRERKRRLRNLDNVLENLGYSVPEGPEPETYEAWTSRALLASIKLASADELNEHLVRAVRHMARHRGWANPWWSLDQLEKASQEPSETFEIILARARELFGEKVPANPTLGMLGALAANNEVLLRPRDEKKRKTGYVRGTPLMFAQVRQGDQLAELRRICEVQGIEDQYEALRLGVFDHKHPYVPKERVGKDPLNPSTNRTIRASLEFQEFRILDSVANLRVRIGSRAKRELTEAEYDAAVEFLMDYADKEQPSWADVAEKIGVPGNRLVAPVLEDVQQKTAPYDRSSAAFEKAMGKKTEARQWWESTDDDQLRSLLIAFLVDATNDTEEAAAEAGLSELYKSWPAEEREALSNIDFEKGRVAYSQETLSKLSEYMHEYRVGLHEARKAVFGVDDTWRPPLDKLEEPTGQPAVDRVLTILRRFVLDCERQWGRPRAITVEHTRTGLMGPTQRQKILNEQKKNRADNERIRDELRESGVDNPSRAEVRRHLIVQEQECQCLYCGTMITTTTSELDHIVPRAGGGSSRRENLAAVCRACNAKKKRELFYAWAGPVKSQETIERVRQLKAFKDSKKAKMFKNQIRRLNQTEADEPIDERSLASTSYAAVAVRERLEQHFNEGLALDDKSRVVLDVYAGAVTRESRRAGGIDERILLRGERDKNRFDVRHHAVDAAVMTLLNRSVALTLEQRSQLRRTFYEQGLDKLDRNQLKPEEDWRDFTGLAPASQEKFLEWRKAATILGDLLAEAIEDDSIAVVSPLRLRPQNGSVHLETISAVKKQTLGSDWPADAVKRIVDPEIYLAMKDALGKLKELPEDSARSLELPDGRFVEADDEVLFFPENAASILTPRGVAEIGGSIHHARLYGWLTKKGELKVGMLRVYGAEFPWLMRESGSRNVLSMPIHRGSQSFRDMQDTTRKAVESGEAVEFAWITQNDELEFDPDDYIAHGGKDELRQFLGFMPECRWRVDGFKKNYQIRIRPAMLSREQLPSDIQRRLESKTLTKNESLLLKALDTGLVVAIGGLLPLETLKVIRRNNLGFPRWRGNGNLPTSFEVRSSALRALGVEGSGGSSMSKTIKDLEEFAAEKLGYDIVFQESISMEPQEVEHLITTDEKSVLVNSTYDDNKEITISMISTPHPEYRPIALIIQDMEGEVQRKELGSGGSPKKKRKVGGSPKKKRKVGSG

SEQ ID NO: 1325 - protein, 1491 aa, unidentified
MAEGGQDSAFEFMKTLLETGIDDCWPNFTNLIADIKTKDGEVIWWKKYKSRNSHAEIQMLNDVEFKDEIGKVKDDKTKKVDIILTLNYSPCSECADKLKKFYEDNKSLIQKFTIRFSRLYRINVQENKDGLKDLDRAGITLEAMTPESWFDVLMTDKSWLESMSTDQKSSFETIMKKKDKFDRVMKLFGLNHDRVKKRDADTSEGLKKLIMEEVVEKTKSLSACSGSETPGTSESATPESMSTDMKNYRIGVAVGDRSVGLAAIEFDDDGLPIQKLALVTFRHDGGLDPTKNKTPMSRKETRGIARRTMRMNRERKRRLRNLDNVLENLGYSVPEGPEPETYEAWTSRALLASIKLASADELNEHLVRAVRHMARHRGWANPWWSLDQLEKASQEPSETFEIILARARELFGEKVPANPTLGMLGALAANNEVLLRPRDEKKRKTGYVRGTPLMFAQVRQGDQLAELRRICEVQGIEDQYEALRLGVFDHKHPYVPKERVGKDPLNPSTNRTIRASLEFQEFRILDSVANLRVRIGSRAKRELTEAEYDAAVEFLMDYADKEQPSWADVAEKIGVPGNRLVAPVLEDVQQKTAPYDRSSAAFEKAMGKKTEARQWWESTDDDQLRSLLIAFLVDATNDTEEAAAEAGLSELYKSWPAEEREALSNIDFEKGRVAYSQETLSKLSEYMHEYRVGLHEARKAVFGVDDTWRPPLDKLEEPTGQPAVDRVLTILRRFVLDCERQWGRPRAITVEHTRTGLMGPTQRQKILNEQKKNRADNERIRDELRESGVDNPSRAEVRRHLIVQEQECQCLYCGTMITTTTSELDHIVPRAGGGSSRRENLAAVCRACNAKKKRELFYAWAGPVKSQETIERVRQLKAFKDSKKAKMFKNQIRRLNQTEADEPIDERSLASTSYAAVAVRERLEQHFNEGLALDDKSRVVLDVYAGAVTRESRRAGGIDERILLRGERDKNRFDVRHHAVDAAVMTLLNRSVALTLEQRSQLRRTFYEQGLDKLDRNQLKPEEDWRDFTGLAPASQEKFLEWRKAATILGDLLAEAIEDDSIAVVSPLRLRPQNGSVHLETISAVKKQTLGSDWPADAVKRIVDPEIYLAMKDALGKLKELPEDSARSLELPDGRFVEADDEVLFFPENAASILTPRGVAEIGGSIHHARLYGWLTKKGELKVGMLRVYGAEFPWLMRESGSRNVLSMPIHRGSQSFRDMQDTTRKAVESGEAVEFAWITQNDELEFDPDDYIAHGGKDELRQFLGFMPECRWRVDGFKKNYQIRIRPAMLSREQLPSDIQRRLESKTLTKNESLLLKALDTGLVVAIGGLLPLETLKVIRRNNLGFPRWRGNGNLPTSFEVRSSALRALGVEGSGGSSMSKTIKDLEEFAAEKLGYDIVFQESISMEPQEVEHLITTDEKSVLVNSTYDDNKEITISMISTPHPEYRPIALIIQDMEGEVQRKELGSGGSPKKKRKVGGSPKKKRKVGSG

SEQ ID NO: 1326 - protein, 1486 aa, unidentified
MAELEESKDFIKNLITTGIRDTDWPKKTYLIVVGKNKTGKVIWKKKYQTLPNKFGSLPNENHTERQMLDDQEFEDQVETGEVRKIILTSNYSPCKECAKGLINFFQERTELELTIRFSHLYEERRVNHLEGLKDLDREERITLEAMTEKSWLDVLTNEEHFLDMVLTFMFDLNPCKVEQRDVATAKKLKKLLKSDSGFELGIVDKMRRMPFESDSDSACSGSETPGTSESATPESMSTDMKNYRIGVAVGDRSVGLAAIEFDDDGLPIQKLALVTFRHDGGLDPTKNKTPMSRKETRGIARRTMRMNRERKRRLRNLDNVLENLGYSVPEGPEPETYEAWTSRALLASIKLASADELNEHLVRAVRHMARHRGWANPWWSLDQLEKASQEPSETFEIILARARELFGEKVPANPTLGMLGALAANNEVLLRPRDEKKRKTGYVRGTPLMFAQVRQGDQLAELRRICEVQGIEDQYEALRLGVFDHKHPYVPKERVGKDPLNPSTNRTIRASLEFQEFRILDSVANLRVRIGSRAKRELTEAEYDAAVEFLMDYADKEQPSWADVAEKIGVPGNRLVAPVLEDVQQKTAPYDRSSAAFEKAMGKKTEARQWWESTDDDQLRSLLIAFLVDATNDTEEAAAEAGLSELYKSWPAEEREALSNIDFEKGRVAYSQETLSKLSEYMHEYRVGLHEARKAVFGVDDTWRPPLDKLEEPTGQPAVDRVLTILRRFVLDCERQWGRPRAITVEHTRTGLMGPTQRQKILNEQKKNRADNERIRDELRESGVDNPSRAEVRRHLIVQEQECQCLYCGTMITTTTSELDHIVPRAGGGSSRRENLAAVCRACNAKKKRELFYAWAGPVKSQETIERVRQLKAFKDSKKAKMFKNQIRRLNQTEADEPIDERSLASTSYAAVAVRERLEQHFNEGLALDDKSRVVLDVYAGAVTRESRRAGGIDERILLRGERDKNRFDVRHHAVDAAVMTLLNRSVALTLEQRSQLRRTFYEQGLDKLDRNQLKPEEDWRDFTGLAPASQEKFLEWRKAATILGDLLAEAIEDDSIAVVSPLRLRPQNGSVHLETISAVKKQTLGSDWPADAVKRIVDPEIYLAMKDALGKLKELPEDSARSLELPDGRFVEADDEVLFFPENAASILTPRGVAEIGGSIHHARLYGWLTKKGELKVGMLRVYGAEFPWLMRESGSRNVLSMPIHRGSQSFRDMQDTTRKAVESGEAVEFAWITQNDELEFDPDDYIAHGGKDELRQFLGFMPECRWRVDGFKKNYQIRIRPAMLSREQLPSDIQRRLESKTLTKNESLLLKALDTGLVVAIGGLLPLETLKVIRRNNLGFPRWRGNGNLPTSFEVRSSALRALGVEGSGGSSMSKTIKDLEEFAAEKLGYDIVFQESISMEPQEVEHLITTDEKSVLVNSTYDDNKEITISMISTPHPEYRPIALIIQDMEGEVQRKELGSGGSPKKKRKVGGSPKKKRKVGSG

SEQ ID NO: 1327 - protein, 1498 aa, unidentified
MSSETGPAVVDPTLRRRIEPQEFEVFFDPRELRKETCLLYEISWGGRRSIWRHTSRNTDKHVEINFIEKLTSERSFRPSARCSITWFLSWSPCGECSKAITEFLSQHPNVTLFIYVARLYHHMDPGNRQGLRNLICRGVTVQIMTEQEYCYCWKNFVNYPPSNEVYWPRFPNVWMRLYMLELLCIILGLPPCLRILRRNQRQGTLFTLVFQRCHYQRIPPPIVWARGMSACSGSETPGTSESATPESMSTDMKNYRIGVAVGDRSVGLAAIEFDDDGLPIQKLALVTFRHDGGLDPTKNKTPMSRKETRGIARRTMRMNRERKRRLRNLDNVLENLGYSVPEGPEPETYEAWTSRALLASIKLASADELNEHLVRAVRHMARHRGWANPWWSLDQLEKASQEPSETFEIILARARELFGEKVPANPTLGMLGALAANNEVLLRPRDEKKRKTGYVRGTPLMFAQVRQGDQLAELRRICEVQGIEDQYEALRLGVFDHKHPYVPKERVGKDPLNPSTNRTIRASLEFQEFRILDSVANLRVRIGSRAKRELTEAEYDAAVEFLMDYADKEQPSWADVAEKIGVPGNRLVAPVLEDVQQKTAPYDRSSAAFEKAMGKKTEARQWWESTDDDQLRSLLIAFLVDATNDTEEAAAEAGLSELYKSWPAEEREALSNIDFEKGRVAYSQETLSKLSEYMHEYRVGLHEARKAVFGVDDTWRPPLDKLEEPTGQPAVDRVLTILRRFVLDCERQWGRPRAITVEHTRTGLMGPTQRQKILNEQKKNRADNERIRDELRESGVDNPSRAEVRRHLIVQEQECQCLYCGTMITTTTSELDHIVPRAGGGSSRRENLAAVCRACNAKKKRELFYAWAGPVKSQETIERVRQLKAFKDSKKAKMFKNQIRRLNQTEADEPIDERSLASTSYAAVAVRERLEQHFNEGLALDDKSRVVLDVYAGAVTRESRRAGGIDERILLRGERDKNRFDVRHHAVDAAVMTLLNRSVALTLEQRSQLRRTFYEQGLDKLDRNQLKPEEDWRDFTGLAPASQEKFLEWRKAATILGDLLAEAIEDDSIAVVSPLRLRPQNGSVHLETISAVKKQTLGSDWPADAVKRIVDPEIYLAMKDALGKLKELPEDSARSLELPDGRFVEADDEVLFFPENAASILTPRGVAEIGGSIHHARLYGWLTKKGELKVGMLRVYGAEFPWLMRESGSRNVLSMPIHRGSQSFRDMQDTTRKAVESGEAVEFAWITQNDELEFDPDDYIAHGGKDELRQFLGFMPECRWRVDGFKKNYQIRIRPAMLSREQLPSDIQRRLESKTLTKNESLLLKALDTGLVVAIGGLLPLETLKVIRRNNLGFPRWRGNGNLPTSFEVRSSALRALGVEGSGGSSMSKTIKDLEEFAAEKLGYDIVFQESISMEPQEVEHLITTDEKSVLVNSTYDDNKEITISMISTPHPEYRPIALIIQDMEGEVQRKELGSGGSPKKKRKVGGSPKKKRKVGSG

SEQ ID NO: 1328 - protein, 1515 aa, unidentified
MSSDVVFCWSTGPSAGDTTLRRRIEPWEFKDSFDPHQLRKETRLLSEVWWGKSSRPWRESRQNATHHVEMNFIEKFTSERHLRPHVCCSITWFLSWSPCWECAKAIREFVSQHPKVRLVIYVARLYWHLDEQNRQGLRALVAGGVHVQIMSDSDYGYCWRNFVNYPPGQEAAWPRFLPVWTALYALELSCILLSLPPCLRISRRRQNQLTFFQVILKNCHYRAIPPLVLSAAGMMHPSVAWCWAESACSGSETPGTSESATPESMSTDMKNYRIGVAVGDRSVGLAAIEFDDDGLPIQKLALVTFRHDGGLDPTKNKTPMSRKETRGIARRTMRMNRERKRRLRNLDNVLENLGYSVPEGPEPETYEAWTSRALLASIKLASADELNEHLVRAVRHMARHRGWANPWWSLDQLEKASQEPSETFEIILARARELFGEKVPANPTLGMLGALAANNEVLLRPRDEKKRKTGYVRGTPLMFAQVRQGDQLAELRRICEVQGIEDQYEALRLGVFDHKHPYVPKERVGKDPLNPSTNRTIRASLEFQEFRILDSVANLRVRIGSRAKRELTEAEYDAAVEFLMDYADKEQPSWADVAEKIGVPGNRLVAPVLEDVQQKTAPYDRSSAAFEKAMGKKTEARQWWESTDDDQLRSLLIAFLVDATNDTEEAAAEAGLSELYKSWPAEEREALSNIDFEKGRVAYSQETLSKLSEYMHEYRVGLHEARKAVFGVDDTWRPPLDKLEEPTGQPAVDRVLTILRRFVLDCERQWGRPRAITVEHTRTGLMGPTQRQKILNEQKKNRADNERIRDELRESGVDNPSRAEVRRHLIVQEQECQCLYCGTMITTTTSELDHIVPRAGGGSSRRENLAAVCRACNAKKKRELFYAWAGPVKSQETIERVRQLKAFKDSKKAKMFKNQIRRLNQTEADEPIDERSLASTSYAAVAVRERLEQHFNEGLALDDKSRVVLDVYAGAVTRESRRAGGIDERILLRGERDKNRFDVRHHAVDAAVMTLLNRSVALTLEQRSQLRRTFYEQGLDKLDRNQLKPEEDWRDFTGLAPASQEKFLEWRKAATILGDLLAEAIEDDSIAVVSPLRLRPQNGSVHLETISAVKKQTLGSDWPADAVKRIVDPEIYLAMKDALGKLKELPEDSARSLELPDGRFVEADDEVLFFPENAASILTPRGVAEIGGSIHHARLYGWLTKKGELKVGMLRVYGAEFPWLMRESGSRNVLSMPIHRGSQSFRDMQDTTRKAVESGEAVEFAWITQNDELEFDPDDYIAHGGKDELRQFLGFMPECRWRVDGFKKNYQIRIRPAMLSREQLPSDIQRRLESKTLTKNESLLLKALDTGLVVAIGGLLPLETLKVIRRNNLGFPRWRGNGNLPTSFEVRSSALRALGVEGSGGSSMSKTIKDLEEFAAEKLGYDIVFQESISMEPQEVEHLITTDEKSVLVNSTYDDNKEITISMISTPHPEYRPIALIIQDMEGEVQRKELGSGGSPKKKRKVGGSPKKKRKVGSG

SEQ ID NO: 1329 - protein, 1485 aa, unidentified
MAEGGNSKDVILKEWLSTGINSKYTGSEWTSVTHLVVYIKDNDGTGIYAKYFRNNKDNHAEINMIKHSEFEKMVRKGKVDITVNSNYSPCSDCASSLITFYGKYKEYINSFTIRFAFLYFINKTKNRDGLKNLKEAGIILEAMTEKSWFEVFMLFKFSSTLADQVRKKDEDTRATLSKLLNEVPETGQVAGAGEEPGIEELTQKTKTVEVTAKNTSACSGSETPGTSESATPESMSTDMKNYRIGVAVGDRSVGLAAIEFDDDGLPIQKLALVTFRHDGGLDPTKNKTPMSRKETRGIARRTMRMNRERKRRLRNLDNVLENLGYSVPEGPEPETYEAWTSRALLASIKLASADELNEHLVRAVRHMARHRGWANPWWSLDQLEKASQEPSETFEIILARARELFGEKVPANPTLGMLGALAANNEVLLRPRDEKKRKTGYVRGTPLMFAQVRQGDQLAELRRICEVQGIEDQYEALRLGVFDHKHPYVPKERVGKDPLNPSTNRTIRASLEFQEFRILDSVANLRVRIGSRAKRELTEAEYDAAVEFLMDYADKEQPSWADVAEKIGVPGNRLVAPVLEDVQQKTAPYDRSSAAFEKAMGKKTEARQWWESTDDDQLRSLLIAFLVDATNDTEEAAAEAGLSELYKSWPAEEREALSNIDFEKGRVAYSQETLSKLSEYMHEYRVGLHEARKAVFGVDDTWRPPLDKLEEPTGQPAVDRVLTILRRFVLDCERQWGRPRAITVEHTRTGLMGPTQRQKILNEQKKNRADNERIRDELRESGVDNPSRAEVRRHLIVQEQECQCLYCGTMITTTTSELDHIVPRAGGGSSRRENLAAVCRACNAKKKRELFYAWAGPVKSQETIERVRQLKAFKDSKKAKMFKNQIRRLNQTEADEPIDERSLASTSYAAVAVRERLEQHFNEGLALDDKSRVVLDVYAGAVTRESRRAGGIDERILLRGERDKNRFDVRHHAVDAAVMTLLNRSVALTLEQRSQLRRTFYEQGLDKLDRNQLKPEEDWRDFTGLAPASQEKFLEWRKAATILGDLLAEAIEDDSIAVVSPLRLRPQNGSVHLETISAVKKQTLGSDWPADAVKRIVDPEIYLAMKDALGKLKELPEDSARSLELPDGRFVEADDEVLFFPENAASILTPRGVAEIGGSIHHARLYGWLTKKGELKVGMLRVYGAEFPWLMRESGSRNVLSMPIHRGSQSFRDMQDTTRKAVESGEAVEFAWITQNDELEFDPDDYIAHGGKDELRQFLGFMPECRWRVDGFKKNYQIRIRPAMLSREQLPSDIQRRLESKTLTKNESLLLKALDTGLVVAIGGLLPLETLKVIRRNNLGFPRWRGNGNLPTSFEVRSSALRALGVEGSGGSSMSKTIKDLEEFAAEKLGYDIVFQESISMEPQEVEHLITTDEKSVLVNSTYDDNKEITISMISTPHPEYRPIALIIQDMEGEVQRKELGSGGSPKKKRKVGGSPKKKRKVGSG

SEQ ID NO: 1330 - protein, 1629 aa, unidentified
MTFLRMDIPDGPLAGRPVRSRMDGVHPVHGRVLALQRAAGNAATTSALGTVQRSVVDEIARMKPDQLVVALQELNPKAAATNLWVTVDGKPVTELISRPAGFESLWPIQSGRGPHAEERFAQGVMPLLAARQPRYILLEITKSPCPSCTALLSQLVGEHPGTRFELHMLGLYPGAGEAEGERGAATRPEDLAELERKLQAKLLDLRAVIDRLTDEQWRKRFKYPKHTKIPIGTRIAALKFARSVHTTMVEARLKLGERQDQTAYGAKLKDLEDKFAELAAFLTAKKADATASARHEPYPAHETGRPTPAAETVTDLDRWTAIKAECPDLQLSEQTYGEYFLYSSHRAFTWFYVHNSLPESACSGSETPGTSESATPESMSTDMKNYRIGVAVGDRSVGLAAIEFDDDGLPIQKLALVTFRHDGGLDPTKNKTPMSRKETRGIARRTMRMNRERKRRLRNLDNVLENLGYSVPEGPEPETYEAWTSRALLASIKLASADELNEHLVRAVRHMARHRGWANPWWSLDQLEKASQEPSETFEIILARARELFGEKVPANPTLGMLGALAANNEVLLRPRDEKKRKTGYVRGTPLMFAQVRQGDQLAELRRICEVQGIEDQYEALRLGVFDHKHPYVPKERVGKDPLNPSTNRTIRASLEFQEFRILDSVANLRVRIGSRAKRELTEAEYDAAVEFLMDYADKEQPSWADVAEKIGVPGNRLVAPVLEDVQQKTAPYDRSSAAFEKAMGKKTEARQWWESTDDDQLRSLLIAFLVDATNDTEEAAAEAGLSELYKSWPAEEREALSNIDFEKGRVAYSQETLSKLSEYMHEYRVGLHEARKAVFGVDDTWRPPLDKLEEPTGQPAVDRVLTILRRFVLDCERQWGRPRAITVEHTRTGLMGPTQRQKILNEQKKNRADNERIRDELRESGVDNPSRAEVRRHLIVQEQECQCLYCGTMITTTTSELDHIVPRAGGGSSRRENLAAVCRACNAKKKRELFYAWAGPVKSQETIERVRQLKAFKDSKKAKMFKNQIRRLNQTEADEPIDERSLASTSYAAVAVRERLEQHFNEGLALDDKSRVVLDVYAGAVTRESRRAGGIDERILLRGERDKNRFDVRHHAVDAAVMTLLNRSVALTLEQRSQLRRTFYEQGLDKLDRNQLKPEEDWRDFTGLAPASQEKFLEWRKAATILGDLLAEAIEDDSIAVVSPLRLRPQNGSVHLETISAVKKQTLGSDWPADAVKRIVDPEIYLAMKDALGKLKELPEDSARSLELPDGRFVEADDEVLFFPENAASILTPRGVAEIGGSIHHARLYGWLTKKGELKVGMLRVYGAEFPWLMRESGSRNVLSMPIHRGSQSFRDMQDTTRKAVESGEAVEFAWITQNDELEFDPDDYIAHGGKDELRQFLGFMPECRWRVDGFKKNYQIRIRPAMLSREQLPSDIQRRLESKTLTKNESLLLKALDTGLVVAIGGLLPLETLKVIRRNNLGFPRWRGNGNLPTSFEVRSSALRALGVEGSGGSSMSKTIKDLEEFAAEKLGYDIVFQESISMEPQEVEHLITTDEKSVLVNSTYDDNKEITISMISTPHPEYRPIALIIQDMEGEVQRKELGSGGSPKKKRKVGGSPKKKRKVGSG

SEQ ID NO: 1331 - protein, 1527 aa, unidentified
MAEGGQDLAFEFMKILLKTGSGNCWPKSTKLIVDIKTKNGEITRRKKYQTSKSHKHAEFQMLNDKVFKDEIEKVKDDKTKKTEKTKTTDKTEKVDIILTLNYSPCSECADKLIEFYKDKRSLIRKFTIRFSRLFRINIQANIDGLKDLNSAGITLKAMTEKSWCDVLMPEESSSFEKVMKLYDLDPVMIRKRDLDTRKTLQELLGKDQSDSSDESGSSHESGPSHESESSDSDAQILVSDMEKINLKAILTDKSVYSSACSGSETPGTSESATPESMSTDMKNYRIGVAVGDRSVGLAAIEFDDDGLPIQKLALVTFRHDGGLDPTKNKTPMSRKETRGIARRTMRMNRERKRRLRNLDNVLENLGYSVPEGPEPETYEAWTSRALLASIKLASADELNEHLVRAVRHMARHRGWANPWWSLDQLEKASQEPSETFEIILARARELFGEKVPANPTLGMLGALAANNEVLLRPRDEKKRKTGYVRGTPLMFAQVRQGDQLAELRRICEVQGIEDQYEALRLGVFDHKHPYVPKERVGKDPLNPSTNRTIRASLEFQEFRILDSVANLRVRIGSRAKRELTEAEYDAAVEFLMDYADKEQPSWADVAEKIGVPGNRLVAPVLEDVQQKTAPYDRSSAAFEKAMGKKTEARQWWESTDDDQLRSLLIAFLVDATNDTEEAAAEAGLSELYKSWPAEEREALSNIDFEKGRVAYSQETLSKLSEYMHEYRVGLHEARKAVFGVDDTWRPPLDKLEEPTGQPAVDRVLTILRRFVLDCERQWGRPRAITVEHTRTGLMGPTQRQKILNEQKKNRADNERIRDELRESGVDNPSRAEVRRHLIVQEQECQCLYCGTMITTTTSELDHIVPRAGGGSSRRENLAAVCRACNAKKKRELFYAWAGPVKSQETIERVRQLKAFKDSKKAKMFKNQIRRLNQTEADEPIDERSLASTSYAAVAVRERLEQHFNEGLALDDKSRVVLDVYAGAVTRESRRAGGIDERILLRGERDKNRFDVRHHAVDAAVMTLLNRSVALTLEQRSQLRRTFYEQGLDKLDRNQLKPEEDWRDFTGLAPASQEKFLEWRKAATILGDLLAEAIEDDSIAVVSPLRLRPQNGSVHLETISAVKKQTLGSDWPADAVKRIVDPEIYLAMKDALGKLKELPEDSARSLELPDGRFVEADDEVLFFPENAASILTPRGVAEIGGSIHHARLYGWLTKKGELKVGMLRVYGAEFPWLMRESGSRNVLSMPIHRGSQSFRDMQDTTRKAVESGEAVEFAWITQNDELEFDPDDYIAHGGKDELRQFLGFMPECRWRVDGFKKNYQIRIRPAMLSREQLPSDIQRRLESKTLTKNESLLLKALDTGLVVAIGGLLPLETLKVIRRNNLGFPRWRGNGNLPTSFEVRSSALRALGVEGSGGSSMSKTIKDLEEFAAEKLGYDIVFQESISMEPQEVEHLITTDEKSVLVNSTYDDNKEITISMISTPHPEYRPIALIIQDMEGEVQRKELGSGGSPKKKRKVGGSPKKKRKVGSG

SEQ ID NO: 1332 - protein, 1481 aa, unidentified
MATTLEESKDFIENLFTTGIKGTVWPKKTYLIVVIKNRRGEVIFRKKYQTLPNRCGFLPNENHTERQMLDDQEFKECLETGEVCEIILTSNYSPCKDCAKDLKNFYEECTELRLTIQFSHPYETNDGKDHLKGLKNLDRAGITLEAMTDESRLDVLRNEEHLLDMVLKFMFDLDPRRVEERDVATKEKLKKLRRTDSEAERFAAKMKNLNLSACSGSETPGTSESATPESMSTDMKNYRIGVAVGDRSVGLAAIEFDDDGLPIQKLALVTFRHDGGLDPTKNKTPMSRKETRGIARRTMRMNRERKRRLRNLDNVLENLGYSVPEGPEPETYEAWTSRALLASIKLASADELNEHLVRAVRHMARHRGWANPWWSLDQLEKASQEPSETFEIILARARELFGEKVPANPTLGMLGALAANNEVLLRPRDEKKRKTGYVRGTPLMFAQVRQGDQLAELRRICEVQGIEDQYEALRLGVFDHKHPYVPKERVGKDPLNPSTNRTIRASLEFQEFRILDSVANLRVRIGSRAKRELTEAEYDAAVEFLMDYADKEQPSWADVAEKIGVPGNRLVAPVLEDVQQKTAPYDRSSAAFEKAMGKKTEARQWWESTDDDQLRSLLIAFLVDATNDTEEAAAEAGLSELYKSWPAEEREALSNIDFEKGRVAYSQETLSKLSEYMHEYRVGLHEARKAVFGVDDTWRPPLDKLEEPTGQPAVDRVLTILRRFVLDCERQWGRPRAITVEHTRTGLMGPTQRQKILNEQKKNRADNERIRDELRESGVDNPSRAEVRRHLIVQEQECQCLYCGTMITTTTSELDHIVPRAGGGSSRRENLAAVCRACNAKKKRELFYAWAGPVKSQETIERVRQLKAFKDSKKAKMFKNQIRRLNQTEADEPIDERSLASTSYAAVAVRERLEQHFNEGLALDDKSRVVLDVYAGAVTRESRRAGGIDERILLRGERDKNRFDVRHHAVDAAVMTLLNRSVALTLEQRSQLRRTFYEQGLDKLDRNQLKPEEDWRDFTGLAPASQEKFLEWRKAATILGDLLAEAIEDDSIAVVSPLRLRPQNGSVHLETISAVKKQTLGSDWPADAVKRIVDPEIYLAMKDALGKLKELPEDSARSLELPDGRFVEADDEVLFFPENAASILTPRGVAEIGGSIHHARLYGWLTKKGELKVGMLRVYGAEFPWLMRESGSRNVLSMPIHRGSQSFRDMQDTTRKAVESGEAVEFAWITQNDELEFDPDDYIAHGGKDELRQFLGFMPECRWRVDGFKKNYQIRIRPAMLSREQLPSDIQRRLESKTLTKNESLLLKALDTGLVVAIGGLLPLETLKVIRRNNLGFPRWRGNGNLPTSFEVRSSALRALGVEGSGGSSMSKTIKDLEEFAAEKLGYDIVFQESISMEPQEVEHLITTDEKSVLVNSTYDDNKEITISMISTPHPEYRPIALIIQDMEGEVQRKELGSGGSPKKKRKVGGSPKKKRKVGSG

SEQ ID NO: 1333 - protein, 1454 aa, unidentified
MAFMKILLKTGIDGYWPKFTNLIVVIKTEDGEVIWTKTYQTSKSHVHTEIQMLTDKKFKDEVEKVKADKTKKVVIILTSNYSPCRECADKLKEFYEDKKSLIQGFTIRFSRLYRINEQDNKNGLKDLYIKGITLEAMTEKSWFDQVMKLFDLDPDKVRKRDADTSKGLKELEIEALADKVEKNLSACSGSETPGTSESATPESMSTDMKNYRIGVAVGDRSVGLAAIEFDDDGLPIQKLALVTFRHDGGLDPTKNKTPMSRKETRGIARRTMRMNRERKRRLRNLDNVLENLGYSVPEGPEPETYEAWTSRALLASIKLASADELNEHLVRAVRHMARHRGWANPWWSLDQLEKASQEPSETFEIILARARELFGEKVPANPTLGMLGALAANNEVLLRPRDEKKRKTGYVRGTPLMFAQVRQGDQLAELRRICEVQGIEDQYEALRLGVFDHKHPYVPKERVGKDPLNPSTNRTIRASLEFQEFRILDSVANLRVRIGSRAKRELTEAEYDAAVEFLMDYADKEQPSWADVAEKIGVPGNRLVAPVLEDVQQKTAPYDRSSAAFEKAMGKKTEARQWWESTDDDQLRSLLIAFLVDATNDTEEAAAEAGLSELYKSWPAEEREALSNIDFEKGRVAYSQETLSKLSEYMHEYRVGLHEARKAVFGVDDTWRPPLDKLEEPTGQPAVDRVLTILRRFVLDCERQWGRPRAITVEHTRTGLMGPTQRQKILNEQKKNRADNERIRDELRESGVDNPSRAEVRRHLIVQEQECQCLYCGTMITTTTSELDHIVPRAGGGSSRRENLAAVCRACNAKKKRELFYAWAGPVKSQETIERVRQLKAFKDSKKAKMFKNQIRRLNQTEADEPIDERSLASTSYAAVAVRERLEQHFNEGLALDDKSRVVLDVYAGAVTRESRRAGGIDERILLRGERDKNRFDVRHHAVDAAVMTLLNRSVALTLEQRSQLRRTFYEQGLDKLDRNQLKPEEDWRDFTGLAPASQEKFLEWRKAATILGDLLAEAIEDDSIAVVSPLRLRPQNGSVHLETISAVKKQTLGSDWPADAVKRIVDPEIYLAMKDALGKLKELPEDSARSLELPDGRFVEADDEVLFFPENAASILTPRGVAEIGGSIHHARLYGWLTKKGELKVGMLRVYGAEFPWLMRESGSRNVLSMPIHRGSQSFRDMQDTTRKAVESGEAVEFAWITQNDELEFDPDDYIAHGGKDELRQFLGFMPECRWRVDGFKKNYQIRIRPAMLSREQLPSDIQRRLESKTLTKNESLLLKALDTGLVVAIGGLLPLETLKVIRRNNLGFPRWRGNGNLPTSFEVRSSALRALGVEGSGGSSMSKTIKDLEEFAAEKLGYDIVFQESISMEPQEVEHLITTDEKSVLVNSTYDDNKEITISMISTPHPEYRPIALIIQDMEGEVQRKELGSGGSPKKKRKVGGSPKKKRKVGSG

SEQ ID NO: 1334 - protein, 1467 aa, unidentified
MFDFYFCALTFLFCFLDDFLNDLLWTGVKGKNRPKRTYLIASIKDNDGKDIFNERFKNTPFGKHAEKTMLCDGDFRKAVAYHHNMEIVLTLNYSPCSSCADDLKLFYETYRNIGNLTIQFSFLYNIQEEENRSGLRNLSNAGVTLQAMNANLWREVGIDLESMASEDERRISGRDKNTGDMLYAVLYRYQNEQDQDTSACSGSETPGTSESATPESMSTDMKNYRIGVAVGDRSVGLAAIEFDDDGLPIQKLALVTFRHDGGLDPTKNKTPMSRKETRGIARRTMRMNRERKRRLRNLDNVLENLGYSVPEGPEPETYEAWTSRALLASIKLASADELNEHLVRAVRHMARHRGWANPWWSLDQLEKASQEPSETFEIILARARELFGEKVPANPTLGMLGALAANNEVLLRPRDEKKRKTGYVRGTPLMFAQVRQGDQLAELRRICEVQGIEDQYEALRLGVFDHKHPYVPKERVGKDPLNPSTNRTIRASLEFQEFRILDSVANLRVRIGSRAKRELTEAEYDAAVEFLMDYADKEQPSWADVAEKIGVPGNRLVAPVLEDVQQKTAPYDRSSAAFEKAMGKKTEARQWWESTDDDQLRSLLIAFLVDATNDTEEAAAEAGLSELYKSWPAEEREALSNIDFEKGRVAYSQETLSKLSEYMHEYRVGLHEARKAVFGVDDTWRPPLDKLEEPTGQPAVDRVLTILRRFVLDCERQWGRPRAITVEHTRTGLMGPTQRQKILNEQKKNRADNERIRDELRESGVDNPSRAEVRRHLIVQEQECQCLYCGTMITTTTSELDHIVPRAGGGSSRRENLAAVCRACNAKKKRELFYAWAGPVKSQETIERVRQLKAFKDSKKAKMFKNQIRRLNQTEADEPIDERSLASTSYAAVAVRERLEQHFNEGLALDDKSRVVLDVYAGAVTRESRRAGGIDERILLRGERDKNRFDVRHHAVDAAVMTLLNRSVALTLEQRSQLRRTFYEQGLDKLDRNQLKPEEDWRDFTGLAPASQEKFLEWRKAATILGDLLAEAIEDDSIAVVSPLRLRPQNGSVHLETISAVKKQTLGSDWPADAVKRIVDPEIYLAMKDALGKLKELPEDSARSLELPDGRFVEADDEVLFFPENAASILTPRGVAEIGGSIHHARLYGWLTKKGELKVGMLRVYGAEFPWLMRESGSRNVLSMPIHRGSQSFRDMQDTTRKAVESGEAVEFAWITQNDELEFDPDDYIAHGGKDELRQFLGFMPECRWRVDGFKKNYQIRIRPAMLSREQLPSDIQRRLESKTLTKNESLLLKALDTGLVVAIGGLLPLETLKVIRRNNLGFPRWRGNGNLPTSFEVRSSALRALGVEGSGGSSMSKTIKDLEEFAAEKLGYDIVFQESISMEPQEVEHLITTDEKSVLVNSTYDDNKEITISMISTPHPEYRPIALIIQDMEGEVQRKELGSGGSPKKKRKVGGSPKKKRKVGSG

SEQ ID NO: 1335 - protein, 1450 aa, unidentified
MVLFDYAIDEEFLTTLLSTGLPDTDLPKRTYLIAVVKTDNGEEIYNERFKNIPNGEHAEERMLNDEDFLHAVVDHHNVKIILTSNYSPCSKCARKLISFYKKRERKIRKFIIQFPFLFKKQEEENRSGLRSLNEVGVTLRAMNADSWFKVGIDFMDVEDKERITERDKKTAYKLKQVLFTSACSGSETPGTSESATPESMSTDMKNYRIGVAVGDRSVGLAAIEFDDDGLPIQKLALVTFRHDGGLDPTKNKTPMSRKETRGIARRTMRMNRERKRRLRNLDNVLENLGYSVPEGPEPETYEAWTSRALLASIKLASADELNEHLVRAVRHMARHRGWANPWWSLDQLEKASQEPSETFEIILARARELFGEKVPANPTLGMLGALAANNEVLLRPRDEKKRKTGYVRGTPLMFAQVRQGDQLAELRRICEVQGIEDQYEALRLGVFDHKHPYVPKERVGKDPLNPSTNRTIRASLEFQEFRILDSVANLRVRIGSRAKRELTEAEYDAAVEFLMDYADKEQPSWADVAEKIGVPGNRLVAPVLEDVQQKTAPYDRSSAAFEKAMGKKTEARQWWESTDDDQLRSLLIAFLVDATNDTEEAAAEAGLSELYKSWPAEEREALSNIDFEKGRVAYSQETLSKLSEYMHEYRVGLHEARKAVFGVDDTWRPPLDKLEEPTGQPAVDRVLTILRRFVLDCERQWGRPRAITVEHTRTGLMGPTQRQKILNEQKKNRADNERIRDELRESGVDNPSRAEVRRHLIVQEQECQCLYCGTMITTTTSELDHIVPRAGGGSSRRENLAAVCRACNAKKKRELFYAWAGPVKSQETIERVRQLKAFKDSKKAKMFKNQIRRLNQTEADEPIDERSLASTSYAAVAVRERLEQHFNEGLALDDKSRVVLDVYAGAVTRESRRAGGIDERILLRGERDKNRFDVRHHAVDAAVMTLLNRSVALTLEQRSQLRRTFYEQGLDKLDRNQLKPEEDWRDFTGLAPASQEKFLEWRKAATILGDLLAEAIEDDSIAVVSPLRLRPQNGSVHLETISAVKKQTLGSDWPADAVKRIVDPEIYLAMKDALGKLKELPEDSARSLELPDGRFVEADDEVLFFPENAASILTPRGVAEIGGSIHHARLYGWLTKKGELKVGMLRVYGAEFPWLMRESGSRNVLSMPIHRGSQSFRDMQDTTRKAVESGEAVEFAWITQNDELEFDPDDYIAHGGKDELRQFLGFMPECRWRVDGFKKNYQIRIRPAMLSREQLPSDIQRRLESKTLTKNESLLLKALDTGLVVAIGGLLPLETLKVIRRNNLGFPRWRGNGNLPTSFEVRSSALRALGVEGSGGSSMSKTIKDLEEFAAEKLGYDIVFQESISMEPQEVEHLITTDEKSVLVNSTYDDNKEITISMISTPHPEYRPIALIIQDMEGEVQRKELGSGGSPKKKRKVGGSPKKKRKVGSG

SEQ ID NO: 1336 - protein, 1520 aa, unidentified
MKGLIECLLFCVSAWSRILACREILTTGSGSNWPHSTALCCFIYKTYKNKKDGQNQIFQKIYQNEPQEQHAEEKMLAIEPDSDFISTIKDKNAVHDIVLVLSYSPCYSCANKLIVFYEKYKNPYSISSFKIRFSQLYKIYGRIPKEEKEKNKKGLKDMLLAGITLETMTDKHWFDLFSRMVFGVNPDSCRIRDNSMERKLDTLKKEAEAAAEVDVDTDADRASDADADTEEEEDLQTMMHTMVLTDEADGSACSGSETPGTSESATPESMSTDMKNYRIGVAVGDRSVGLAAIEFDDDGLPIQKLALVTFRHDGGLDPTKNKTPMSRKETRGIARRTMRMNRERKRRLRNLDNVLENLGYSVPEGPEPETYEAWTSRALLASIKLASADELNEHLVRAVRHMARHRGWANPWWSLDQLEKASQEPSETFEIILARARELFGEKVPANPTLGMLGALAANNEVLLRPRDEKKRKTGYVRGTPLMFAQVRQGDQLAELRRICEVQGIEDQYEALRLGVFDHKHPYVPKERVGKDPLNPSTNRTIRASLEFQEFRILDSVANLRVRIGSRAKRELTEAEYDAAVEFLMDYADKEQPSWADVAEKIGVPGNRLVAPVLEDVQQKTAPYDRSSAAFEKAMGKKTEARQWWESTDDDQLRSLLIAFLVDATNDTEEAAAEAGLSELYKSWPAEEREALSNIDFEKGRVAYSQETLSKLSEYMHEYRVGLHEARKAVFGVDDTWRPPLDKLEEPTGQPAVDRVLTILRRFVLDCERQWGRPRAITVEHTRTGLMGPTQRQKILNEQKKNRADNERIRDELRESGVDNPSRAEVRRHLIVQEQECQCLYCGTMITTTTSELDHIVPRAGGGSSRRENLAAVCRACNAKKKRELFYAWAGPVKSQETIERVRQLKAFKDSKKAKMFKNQIRRLNQTEADEPIDERSLASTSYAAVAVRERLEQHFNEGLALDDKSRVVLDVYAGAVTRESRRAGGIDERILLRGERDKNRFDVRHHAVDAAVMTLLNRSVALTLEQRSQLRRTFYEQGLDKLDRNQLKPEEDWRDFTGLAPASQEKFLEWRKAATILGDLLAEAIEDDSIAVVSPLRLRPQNGSVHLETISAVKKQTLGSDWPADAVKRIVDPEIYLAMKDALGKLKELPEDSARSLELPDGRFVEADDEVLFFPENAASILTPRGVAEIGGSIHHARLYGWLTKKGELKVGMLRVYGAEFPWLMRESGSRNVLSMPIHRGSQSFRDMQDTTRKAVESGEAVEFAWITQNDELEFDPDDYIAHGGKDELRQFLGFMPECRWRVDGFKKNYQIRIRPAMLSREQLPSDIQRRLESKTLTKNESLLLKALDTGLVVAIGGLLPLETLKVIRRNNLGFPRWRGNGNLPTSFEVRSSALRALGVEGSGGSSMSKTIKDLEEFAAEKLGYDIVFQESISMEPQEVEHLITTDEKSVLVNSTYDDNKEITISMISTPHPEYRPIALIIQDMEGEVQRKELGSGGSPKKKRKVGGSPKKKRKVGSG

SEQ ID NO: 1337 - protein, 1603 aa, unidentified
MYISRRALGYHFDPRVSPRDTFLLCRLQWGARGRRWKHWVRKDRHHAEVYFLEKIFEPRRFNNAHCSITWYLSWSPCANCCYRIVQFLMKHSYVSIDIRVARLYFIEDETTRQGLEELVSCARVRLTVMDTEGKVPFVLWNWEGVNWWKIEPDEFKTNYSPDHRPRVVYLLYEIRWRRGTIWRNWCSNNIDQHAEVNFLENCFKAKPSVSCSITWFLSTAPCAKCSRRILKFLTAHPKVTLEIYAAKLFRHLEIRNRQGLMDLAVNGVILRIMNLADYSYCWKQFVAYQRGQEVYWPQSFSPYIFLNWRELHHILLVSRYLKRTLPVKSNGRSSACSGSETPGTSESATPESMSTDMKNYRIGVAVGDRSVGLAAIEFDDDGLPIQKLALVTFRHDGGLDPTKNKTPMSRKETRGIARRTMRMNRERKRRLRNLDNVLENLGYSVPEGPEPETYEAWTSRALLASIKLASADELNEHLVRAVRHMARHRGWANPWWSLDQLEKASQEPSETFEIILARARELFGEKVPANPTLGMLGALAANNEVLLRPRDEKKRKTGYVRGTPLMFAQVRQGDQLAELRRICEVQGIEDQYEALRLGVFDHKHPYVPKERVGKDPLNPSTNRTIRASLEFQEFRILDSVANLRVRIGSRAKRELTEAEYDAAVEFLMDYADKEQPSWADVAEKIGVPGNRLVAPVLEDVQQKTAPYDRSSAAFEKAMGKKTEARQWWESTDDDQLRSLLIAFLVDATNDTEEAAAEAGLSELYKSWPAEEREALSNIDFEKGRVAYSQETLSKLSEYMHEYRVGLHEARKAVFGVDDTWRPPLDKLEEPTGQPAVDRVLTILRRFVLDCERQWGRPRAITVEHTRTGLMGPTQRQKILNEQKKNRADNERIRDELRESGVDNPSRAEVRRHLIVQEQECQCLYCGTMITTTTSELDHIVPRAGGGSSRRENLAAVCRACNAKKKRELFYAWAGPVKSQETIERVRQLKAFKDSKKAKMFKNQIRRLNQTEADEPIDERSLASTSYAAVAVRERLEQHFNEGLALDDKSRVVLDVYAGAVTRESRRAGGIDERILLRGERDKNRFDVRHHAVDAAVMTLLNRSVALTLEQRSQLRRTFYEQGLDKLDRNQLKPEEDWRDFTGLAPASQEKFLEWRKAATILGDLLAEAIEDDSIAVVSPLRLRPQNGSVHLETISAVKKQTLGSDWPADAVKRIVDPEIYLAMKDALGKLKELPEDSARSLELPDGRFVEADDEVLFFPENAASILTPRGVAEIGGSIHHARLYGWLTKKGELKVGMLRVYGAEFPWLMRESGSRNVLSMPIHRGSQSFRDMQDTTRKAVESGEAVEFAWITQNDELEFDPDDYIAHGGKDELRQFLGFMPECRWRVDGFKKNYQIRIRPAMLSREQLPSDIQRRLESKTLTKNESLLLKALDTGLVVAIGGLLPLETLKVIRRNNLGFPRWRGNGNLPTSFEVRSSALRALGVEGSGGSSMSKTIKDLEEFAAEKLGYDIVFQESISMEPQEVEHLITTDEKSVLVNSTYDDNKEITISMISTPHPEYRPIALIIQDMEGEVQRKELGSGGSPKKKRKVGGSPKKKRKVGSG

SEQ ID NO: 1338 - protein, 1527 aa, unidentified
MAEGGQDLAFEFMKILLKTGIGKCWPKFTNLIADIKTKDGEVTWRKKYQTSKSHKHAEFQMLNDKEFKDEIGKVKADKTKRTEKTNKTEKTNKTEKTEKVDIILTLNYSPCGECADELVEFYKDKRSLIRKFTIRFSRLFRINIQANIDGLKDLNSAGITLKAMTEKSWYDVLMPEESSGFEEVMELYDLDPVMIRKRDLDTRKTLQELLGKDQSDSSDESGSSHESGPSHESESSDSDAQLLVSDMEKLKFESDSDSACSGSETPGTSESATPESMSTDMKNYRIGVAVGDRSVGLAAIEFDDDGLPIQKLALVTFRHDGGLDPTKNKTPMSRKETRGIARRTMRMNRERKRRLRNLDNVLENLGYSVPEGPEPETYEAWTSRALLASIKLASADELNEHLVRAVRHMARHRGWANPWWSLDQLEKASQEPSETFEIILARARELFGEKVPANPTLGMLGALAANNEVLLRPRDEKKRKTGYVRGTPLMFAQVRQGDQLAELRRICEVQGIEDQYEALRLGVFDHKHPYVPKERVGKDPLNPSTNRTIRASLEFQEFRILDSVANLRVRIGSRAKRELTEAEYDAAVEFLMDYADKEQPSWADVAEKIGVPGNRLVAPVLEDVQQKTAPYDRSSAAFEKAMGKKTEARQWWESTDDDQLRSLLIAFLVDATNDTEEAAAEAGLSELYKSWPAEEREALSNIDFEKGRVAYSQETLSKLSEYMHEYRVGLHEARKAVFGVDDTWRPPLDKLEEPTGQPAVDRVLTILRRFVLDCERQWGRPRAITVEHTRTGLMGPTQRQKILNEQKKNRADNERIRDELRESGVDNPSRAEVRRHLIVQEQECQCLYCGTMITTTTSELDHIVPRAGGGSSRRENLAAVCRACNAKKKRELFYAWAGPVKSQETIERVRQLKAFKDSKKAKMFKNQIRRLNQTEADEPIDERSLASTSYAAVAVRERLEQHFNEGLALDDKSRVVLDVYAGAVTRESRRAGGIDERILLRGERDKNRFDVRHHAVDAAVMTLLNRSVALTLEQRSQLRRTFYEQGLDKLDRNQLKPEEDWRDFTGLAPASQEKFLEWRKAATILGDLLAEAIEDDSIAVVSPLRLRPQNGSVHLETISAVKKQTLGSDWPADAVKRIVDPEIYLAMKDALGKLKELPEDSARSLELPDGRFVEADDEVLFFPENAASILTPRGVAEIGGSIHHARLYGWLTKKGELKVGMLRVYGAEFPWLMRESGSRNVLSMPIHRGSQSFRDMQDTTRKAVESGEAVEFAWITQNDELEFDPDDYIAHGGKDELRQFLGFMPECRWRVDGFKKNYQIRIRPAMLSREQLPSDIQRRLESKTLTKNESLLLKALDTGLVVAIGGLLPLETLKVIRRNNLGFPRWRGNGNLPTSFEVRSSALRALGVEGSGGSSMSKTIKDLEEFAAEKLGYDIVFQESISMEPQEVEHLITTDEKSVLVNSTYDDNKEITISMISTPHPEYRPIALIIQDMEGEVQRKELGSGGSPKKKRKVGGSPKKKRKVGSG

SEQ ID NO: 1339 - protein, 1506 aa, unidentified
MASETGPSAGDPTLRRRIEPWEFEVFFDPRELRRETCLLYEIQWGTSHRRWRKSGKNTTNHAEVNFIEKLTSERQFCPSVRCSITWFLSWSPCWECSQAIQEFLSQHPNVTLVIYVARLYYAMDQRNRQGLRDLVNSGVTIQIMSVPEYCYCWRNFVNFPPGQEAHWPRYQPQWMALYELELHCIILSLPPCLKISRRCQKQLTFFGLTLQNCHYQAIPPHILLATGLVLPFVPWRSACSGSETPGTSESATPESMSTDMKNYRIGVAVGDRSVGLAAIEFDDDGLPIQKLALVTFRHDGGLDPTKNKTPMSRKETRGIARRTMRMNRERKRRLRNLDNVLENLGYSVPEGPEPETYEAWTSRALLASIKLASADELNEHLVRAVRHMARHRGWANPWWSLDQLEKASQEPSETFEIILARARELFGEKVPANPTLGMLGALAANNEVLLRPRDEKKRKTGYVRGTPLMFAQVRQGDQLAELRRICEVQGIEDQYEALRLGVFDHKHPYVPKERVGKDPLNPSTNRTIRASLEFQEFRILDSVANLRVRIGSRAKRELTEAEYDAAVEFLMDYADKEQPSWADVAEKIGVPGNRLVAPVLEDVQQKTAPYDRSSAAFEKAMGKKTEARQWWESTDDDQLRSLLIAFLVDATNDTEEAAAEAGLSELYKSWPAEEREALSNIDFEKGRVAYSQETLSKLSEYMHEYRVGLHEARKAVFGVDDTWRPPLDKLEEPTGQPAVDRVLTILRRFVLDCERQWGRPRAITVEHTRTGLMGPTQRQKILNEQKKNRADNERIRDELRESGVDNPSRAEVRRHLIVQEQECQCLYCGTMITTTTSELDHIVPRAGGGSSRRENLAAVCRACNAKKKRELFYAWAGPVKSQETIERVRQLKAFKDSKKAKMFKNQIRRLNQTEADEPIDERSLASTSYAAVAVRERLEQHFNEGLALDDKSRVVLDVYAGAVTRESRRAGGIDERILLRGERDKNRFDVRHHAVDAAVMTLLNRSVALTLEQRSQLRRTFYEQGLDKLDRNQLKPEEDWRDFTGLAPASQEKFLEWRKAATILGDLLAEAIEDDSIAVVSPLRLRPQNGSVHLETISAVKKQTLGSDWPADAVKRIVDPEIYLAMKDALGKLKELPEDSARSLELPDGRFVEADDEVLFFPENAASILTPRGVAEIGGSIHHARLYGWLTKKGELKVGMLRVYGAEFPWLMRESGSRNVLSMPIHRGSQSFRDMQDTTRKAVESGEAVEFAWITQNDELEFDPDDYIAHGGKDELRQFLGFMPECRWRVDGFKKNYQIRIRPAMLSREQLPSDIQRRLESKTLTKNESLLLKALDTGLVVAIGGLLPLETLKVIRRNNLGFPRWRGNGNLPTSFEVRSSALRALGVEGSGGSSMSKTIKDLEEFAAEKLGYDIVFQESISMEPQEVEHLITTDEKSVLVNSTYDDNKEITISMISTPHPEYRPIALIIQDMEGEVQRKELGSGGSPKKKRKVGGSPKKKRKVGSG

SEQ ID NO: 1340 - protein, 1576 aa, unidentified
MAFWRTKKWSYMYRKHNSSIPDEMDVCSMFDSSDESDSSDESDSSDEADSSDESDSSDEADSSDECDSSEESDSADKSKTGYKRIKSKHPRRTYNVEDKKENGNIIQHIYNTGLDHDDWSEAMDTFLVCKINGVHNPKIMRNNSENHAEQLLIQNLRKKYKEKKMPFKLTVYINNSPCSMCAKALENFLNKNKNVKLTFYVTNMYHIKRNSCLKARHFEHLNSIPKKSHKANSEGLRDLLRHKRCNIKAFNMGVWKELLNTVDVLSKVKTKLIGGYNRIQYANKRSRGYEDDLIKKDLTYLKSYKKSACSGSETPGTSESATPESMSTDMKNYRIGVAVGDRSVGLAAIEFDDDGLPIQKLALVTFRHDGGLDPTKNKTPMSRKETRGIARRTMRMNRERKRRLRNLDNVLENLGYSVPEGPEPETYEAWTSRALLASIKLASADELNEHLVRAVRHMARHRGWANPWWSLDQLEKASQEPSETFEIILARARELFGEKVPANPTLGMLGALAANNEVLLRPRDEKKRKTGYVRGTPLMFAQVRQGDQLAELRRICEVQGIEDQYEALRLGVFDHKHPYVPKERVGKDPLNPSTNRTIRASLEFQEFRILDSVANLRVRIGSRAKRELTEAEYDAAVEFLMDYADKEQPSWADVAEKIGVPGNRLVAPVLEDVQQKTAPYDRSSAAFEKAMGKKTEARQWWESTDDDQLRSLLIAFLVDATNDTEEAAAEAGLSELYKSWPAEEREALSNIDFEKGRVAYSQETLSKLSEYMHEYRVGLHEARKAVFGVDDTWRPPLDKLEEPTGQPAVDRVLTILRRFVLDCERQWGRPRAITVEHTRTGLMGPTQRQKILNEQKKNRADNERIRDELRESGVDNPSRAEVRRHLIVQEQECQCLYCGTMITTTTSELDHIVPRAGGGSSRRENLAAVCRACNAKKKRELFYAWAGPVKSQETIERVRQLKAFKDSKKAKMFKNQIRRLNQTEADEPIDERSLASTSYAAVAVRERLEQHFNEGLALDDKSRVVLDVYAGAVTRESRRAGGIDERILLRGERDKNRFDVRHHAVDAAVMTLLNRSVALTLEQRSQLRRTFYEQGLDKLDRNQLKPEEDWRDFTGLAPASQEKFLEWRKAATILGDLLAEAIEDDSIAVVSPLRLRPQNGSVHLETISAVKKQTLGSDWPADAVKRIVDPEIYLAMKDALGKLKELPEDSARSLELPDGRFVEADDEVLFFPENAASILTPRGVAEIGGSIHHARLYGWLTKKGELKVGMLRVYGAEFPWLMRESGSRNVLSMPIHRGSQSFRDMQDTTRKAVESGEAVEFAWITQNDELEFDPDDYIAHGGKDELRQFLGFMPECRWRVDGFKKNYQIRIRPAMLSREQLPSDIQRRLESKTLTKNESLLLKALDTGLVVAIGGLLPLETLKVIRRNNLGFPRWRGNGNLPTSFEVRSSALRALGVEGSGGSSMSKTIKDLEEFAAEKLGYDIVFQESISMEPQEVEHLITTDEKSVLVNSTYDDNKEITISMISTPHPEYRPIALIIQDMEGEVQRKELGSGGSPKKKRKVGGSPKKKRKVGSG

SEQ ID NO: 1341 - protein, 1453 aa, unidentified
MYKKKLRGMYMSKKAFKYHFDPRESPRATYLLCVIQWGCNGLPWIHWVKNGRSHAERYFLQKVFKMRRSNNNINCSITLYLSWSPCRNCCYEMQYFLKKHPNVNICIYLARLYYTEDEEICKALKDLSEKKVIISVMKIEDYIYCWKTFVSGNAAAGSWFKDFESQINKNHFQLKRILEVSPLSACSGSETPGTSESATPESMSTDMKNYRIGVAVGDRSVGLAAIEFDDDGLPIQKLALVTFRHDGGLDPTKNKTPMSRKETRGIARRTMRMNRERKRRLRNLDNVLENLGYSVPEGPEPETYEAWTSRALLASIKLASADELNEHLVRAVRHMARHRGWANPWWSLDQLEKASQEPSETFEIILARARELFGEKVPANPTLGMLGALAANNEVLLRPRDEKKRKTGYVRGTPLMFAQVRQGDQLAELRRICEVQGIEDQYEALRLGVFDHKHPYVPKERVGKDPLNPSTNRTIRASLEFQEFRILDSVANLRVRIGSRAKRELTEAEYDAAVEFLMDYADKEQPSWADVAEKIGVPGNRLVAPVLEDVQQKTAPYDRSSAAFEKAMGKKTEARQWWESTDDDQLRSLLIAFLVDATNDTEEAAAEAGLSELYKSWPAEEREALSNIDFEKGRVAYSQETLSKLSEYMHEYRVGLHEARKAVFGVDDTWRPPLDKLEEPTGQPAVDRVLTILRRFVLDCERQWGRPRAITVEHTRTGLMGPTQRQKILNEQKKNRADNERIRDELRESGVDNPSRAEVRRHLIVQEQECQCLYCGTMITTTTSELDHIVPRAGGGSSRRENLAAVCRACNAKKKRELFYAWAGPVKSQETIERVRQLKAFKDSKKAKMFKNQIRRLNQTEADEPIDERSLASTSYAAVAVRERLEQHFNEGLALDDKSRVVLDVYAGAVTRESRRAGGIDERILLRGERDKNRFDVRHHAVDAAVMTLLNRSVALTLEQRSQLRRTFYEQGLDKLDRNQLKPEEDWRDFTGLAPASQEKFLEWRKAATILGDLLAEAIEDDSIAVVSPLRLRPQNGSVHLETISAVKKQTLGSDWPADAVKRIVDPEIYLAMKDALGKLKELPEDSARSLELPDGRFVEADDEVLFFPENAASILTPRGVAEIGGSIHHARLYGWLTKKGELKVGMLRVYGAEFPWLMRESGSRNVLSMPIHRGSQSFRDMQDTTRKAVESGEAVEFAWITQNDELEFDPDDYIAHGGKDELRQFLGFMPECRWRVDGFKKNYQIRIRPAMLSREQLPSDIQRRLESKTLTKNESLLLKALDTGLVVAIGGLLPLETLKVIRRNNLGFPRWRGNGNLPTSFEVRSSALRALGVEGSGGSSMSKTIKDLEEFAAEKLGYDIVFQESISMEPQEVEHLITTDEKSVLVNSTYDDNKEITISMISTPHPEYRPIALIIQDMEGEVQRKELGSGGSPKKKRKVGGSPKKKRKVGSG

SEQ ID NO: 1342 - protein, 1463 aa, unidentified
MAAVSARGPSSRENNQGWKMQPEDFQRNYSPRQNGRVYLLYEIRWRSSSIWRNWCSNNPEQHAEVNFLENHFNNQPQTPCCITWFLSASPCGNCCRRILKFLRSHPNVTLVICAAKLFRHLDIRNRRGLRSLMMNGVAIRIMNLEDYRYCWRNFVAHQPGQDDYWPQNVTLYFILNSIELLHIFLDLPPFLANSACSGSETPGTSESATPESMSTDMKNYRIGVAVGDRSVGLAAIEFDDDGLPIQKLALVTFRHDGGLDPTKNKTPMSRKETRGIARRTMRMNRERKRRLRNLDNVLENLGYSVPEGPEPETYEAWTSRALLASIKLASADELNEHLVRAVRHMARHRGWANPWWSLDQLEKASQEPSETFEIILARARELFGEKVPANPTLGMLGALAANNEVLLRPRDEKKRKTGYVRGTPLMFAQVRQGDQLAELRRICEVQGIEDQYEALRLGVFDHKHPYVPKERVGKDPLNPSTNRTIRASLEFQEFRILDSVANLRVRIGSRAKRELTEAEYDAAVEFLMDYADKEQPSWADVAEKIGVPGNRLVAPVLEDVQQKTAPYDRSSAAFEKAMGKKTEARQWWESTDDDQLRSLLIAFLVDATNDTEEAAAEAGLSELYKSWPAEEREALSNIDFEKGRVAYSQETLSKLSEYMHEYRVGLHEARKAVFGVDDTWRPPLDKLEEPTGQPAVDRVLTILRRFVLDCERQWGRPRAITVEHTRTGLMGPTQRQKILNEQKKNRADNERIRDELRESGVDNPSRAEVRRHLIVQEQECQCLYCGTMITTTTSELDHIVPRAGGGSSRRENLAAVCRACNAKKKRELFYAWAGPVKSQETIERVRQLKAFKDSKKAKMFKNQIRRLNQTEADEPIDERSLASTSYAAVAVRERLEQHFNEGLALDDKSRVVLDVYAGAVTRESRRAGGIDERILLRGERDKNRFDVRHHAVDAAVMTLLNRSVALTLEQRSQLRRTFYEQGLDKLDRNQLKPEEDWRDFTGLAPASQEKFLEWRKAATILGDLLAEAIEDDSIAVVSPLRLRPQNGSVHLETISAVKKQTLGSDWPADAVKRIVDPEIYLAMKDALGKLKELPEDSARSLELPDGRFVEADDEVLFFPENAASILTPRGVAEIGGSIHHARLYGWLTKKGELKVGMLRVYGAEFPWLMRESGSRNVLSMPIHRGSQSFRDMQDTTRKAVESGEAVEFAWITQNDELEFDPDDYIAHGGKDELRQFLGFMPECRWRVDGFKKNYQIRIRPAMLSREQLPSDIQRRLESKTLTKNESLLLKALDTGLVVAIGGLLPLETLKVIRRNNLGFPRWRGNGNLPTSFEVRSSALRALGVEGSGGSSMSKTIKDLEEFAAEKLGYDIVFQESISMEPQEVEHLITTDEKSVLVNSTYDDNKEITISMISTPHPEYRPIALIIQDMEGEVQRKELGSGGSPKKKRKVGGSPKKKRKVGSG

SEQ ID NO: 1343 - protein, 1499 aa, unidentified
MTTMRGPAAGDATLRRRIEPWDFQDFFDPRDLRRETCLLYEINWGGRHSVWRHTGKNTSNHVEVNFIEKFTSERYYSPSARCSIIWFLSWSPCWECSKAIIEFLHQHRNVTLFIYVARLFHHTDLRNRQGIRDLISSGVTIQIMTEPEYCYCWRYFVNYPPGSEVHWPRYPRQWMMLYVLELQCIILGLPSCVKILRRHQNQLTIFTLDLQNCHYQMIPPHILLATGLISACSGSETPGTSESATPESMSTDMKNYRIGVAVGDRSVGLAAIEFDDDGLPIQKLALVTFRHDGGLDPTKNKTPMSRKETRGIARRTMRMNRERKRRLRNLDNVLENLGYSVPEGPEPETYEAWTSRALLASIKLASADELNEHLVRAVRHMARHRGWANPWWSLDQLEKASQEPSETFEIILARARELFGEKVPANPTLGMLGALAANNEVLLRPRDEKKRKTGYVRGTPLMFAQVRQGDQLAELRRICEVQGIEDQYEALRLGVFDHKHPYVPKERVGKDPLNPSTNRTIRASLEFQEFRILDSVANLRVRIGSRAKRELTEAEYDAAVEFLMDYADKEQPSWADVAEKIGVPGNRLVAPVLEDVQQKTAPYDRSSAAFEKAMGKKTEARQWWESTDDDQLRSLLIAFLVDATNDTEEAAAEAGLSELYKSWPAEEREALSNIDFEKGRVAYSQETLSKLSEYMHEYRVGLHEARKAVFGVDDTWRPPLDKLEEPTGQPAVDRVLTILRRFVLDCERQWGRPRAITVEHTRTGLMGPTQRQKILNEQKKNRADNERIRDELRESGVDNPSRAEVRRHLIVQEQECQCLYCGTMITTTTSELDHIVPRAGGGSSRRENLAAVCRACNAKKKRELFYAWAGPVKSQETIERVRQLKAFKDSKKAKMFKNQIRRLNQTEADEPIDERSLASTSYAAVAVRERLEQHFNEGLALDDKSRVVLDVYAGAVTRESRRAGGIDERILLRGERDKNRFDVRHHAVDAAVMTLLNRSVALTLEQRSQLRRTFYEQGLDKLDRNQLKPEEDWRDFTGLAPASQEKFLEWRKAATILGDLLAEAIEDDSIAVVSPLRLRPQNGSVHLETISAVKKQTLGSDWPADAVKRIVDPEIYLAMKDALGKLKELPEDSARSLELPDGRFVEADDEVLFFPENAASILTPRGVAEIGGSIHHARLYGWLTKKGELKVGMLRVYGAEFPWLMRESGSRNVLSMPIHRGSQSFRDMQDTTRKAVESGEAVEFAWITQNDELEFDPDDYIAHGGKDELRQFLGFMPECRWRVDGFKKNYQIRIRPAMLSREQLPSDIQRRLESKTLTKNESLLLKALDTGLVVAIGGLLPLETLKVIRRNNLGFPRWRGNGNLPTSFEVRSSALRALGVEGSGGSSMSKTIKDLEEFAAEKLGYDIVFQESISMEPQEVEHLITTDEKSVLVNSTYDDNKEITISMISTPHPEYRPIALIIQDMEGEVQRKELGSGGSPKKKRKVGGSPKKKRKVGSG

SEQ ID NO: 1344 - protein, 1537 aa, unidentified
MTDKFAPLPLIKMESVPSPGDRSTDSYQTDNSDEDDASDCDFESCERFSYTPYKVNDIIHKMWDTVLDHNNGYQQNLASSTYLVYKIEGMHKPGILKNDTMHAEKQLISIIQGNFTAPLKIIIYIYINNSPCAECATLLKKFMVDNQKIKMVLYIAHLYNIKRSSCVLRAALKKESRHVDCIPKAFHEKNYLGLRNLMSIGGHRCRIEAFKKKVWEDLLALTGISTQMMDNYNRRKKGYDRSRQNEDKRIKKDLNEIKRKPKPPYMYSACSGSETPGTSESATPESMSTDMKNYRIGVAVGDRSVGLAAIEFDDDGLPIQKLALVTFRHDGGLDPTKNKTPMSRKETRGIARRTMRMNRERKRRLRNLDNVLENLGYSVPEGPEPETYEAWTSRALLASIKLASADELNEHLVRAVRHMARHRGWANPWWSLDQLEKASQEPSETFEIILARARELFGEKVPANPTLGMLGALAANNEVLLRPRDEKKRKTGYVRGTPLMFAQVRQGDQLAELRRICEVQGIEDQYEALRLGVFDHKHPYVPKERVGKDPLNPSTNRTIRASLEFQEFRILDSVANLRVRIGSRAKRELTEAEYDAAVEFLMDYADKEQPSWADVAEKIGVPGNRLVAPVLEDVQQKTAPYDRSSAAFEKAMGKKTEARQWWESTDDDQLRSLLIAFLVDATNDTEEAAAEAGLSELYKSWPAEEREALSNIDFEKGRVAYSQETLSKLSEYMHEYRVGLHEARKAVFGVDDTWRPPLDKLEEPTGQPAVDRVLTILRRFVLDCERQWGRPRAITVEHTRTGLMGPTQRQKILNEQKKNRADNERIRDELRESGVDNPSRAEVRRHLIVQEQECQCLYCGTMITTTTSELDHIVPRAGGGSSRRENLAAVCRACNAKKKRELFYAWAGPVKSQETIERVRQLKAFKDSKKAKMFKNQIRRLNQTEADEPIDERSLASTSYAAVAVRERLEQHFNEGLALDDKSRVVLDVYAGAVTRESRRAGGIDERILLRGERDKNRFDVRHHAVDAAVMTLLNRSVALTLEQRSQLRRTFYEQGLDKLDRNQLKPEEDWRDFTGLAPASQEKFLEWRKAATILGDLLAEAIEDDSIAVVSPLRLRPQNGSVHLETISAVKKQTLGSDWPADAVKRIVDPEIYLAMKDALGKLKELPEDSARSLELPDGRFVEADDEVLFFPENAASILTPRGVAEIGGSIHHARLYGWLTKKGELKVGMLRVYGAEFPWLMRESGSRNVLSMPIHRGSQSFRDMQDTTRKAVESGEAVEFAWITQNDELEFDPDDYIAHGGKDELRQFLGFMPECRWRVDGFKKNYQIRIRPAMLSREQLPSDIQRRLESKTLTKNESLLLKALDTGLVVAIGGLLPLETLKVIRRNNLGFPRWRGNGNLPTSFEVRSSALRALGVEGSGGSSMSKTIKDLEEFAAEKLGYDIVFQESISMEPQEVEHLITTDEKSVLVNSTYDDNKEITISMISTPHPEYRPIALIIQDMEGEVQRKELGSGGSPKKKRKVGGSPKKKRKVGSG

SEQ ID NO: 1345 - protein, 1497 aa, unidentified
MWNTVLNHGYGYSELGGSLASETYLVCKMDGEPKPIIKGNNIEKHAEMQLVDDLKQMELLQKKVTVYINNSPCAACAKKLKDYLEENEGIHLTLYVTHLYNIRRMSCQLRVNALEKERHIYYCEEHEANYQGLKDLMSLGGNRCEIKAFTVDVWRELHEVMGLTTDDYQQRMKKYNTMIQDPTQDPKNKKNHDRSRKREDINIKNDLNHLKENVDPWNGIRKIFLKRSACSGSETPGTSESATPESMSTDMKNYRIGVAVGDRSVGLAAIEFDDDGLPIQKLALVTFRHDGGLDPTKNKTPMSRKETRGIARRTMRMNRERKRRLRNLDNVLENLGYSVPEGPEPETYEAWTSRALLASIKLASADELNEHLVRAVRHMARHRGWANPWWSLDQLEKASQEPSETFEIILARARELFGEKVPANPTLGMLGALAANNEVLLRPRDEKKRKTGYVRGTPLMFAQVRQGDQLAELRRICEVQGIEDQYEALRLGVFDHKHPYVPKERVGKDPLNPSTNRTIRASLEFQEFRILDSVANLRVRIGSRAKRELTEAEYDAAVEFLMDYADKEQPSWADVAEKIGVPGNRLVAPVLEDVQQKTAPYDRSSAAFEKAMGKKTEARQWWESTDDDQLRSLLIAFLVDATNDTEEAAAEAGLSELYKSWPAEEREALSNIDFEKGRVAYSQETLSKLSEYMHEYRVGLHEARKAVFGVDDTWRPPLDKLEEPTGQPAVDRVLTILRRFVLDCERQWGRPRAITVEHTRTGLMGPTQRQKILNEQKKNRADNERIRDELRESGVDNPSRAEVRRHLIVQEQECQCLYCGTMITTTTSELDHIVPRAGGGSSRRENLAAVCRACNAKKKRELFYAWAGPVKSQETIERVRQLKAFKDSKKAKMFKNQIRRLNQTEADEPIDERSLASTSYAAVAVRERLEQHFNEGLALDDKSRVVLDVYAGAVTRESRRAGGIDERILLRGERDKNRFDVRHHAVDAAVMTLLNRSVALTLEQRSQLRRTFYEQGLDKLDRNQLKPEEDWRDFTGLAPASQEKFLEWRKAATILGDLLAEAIEDDSIAVVSPLRLRPQNGSVHLETISAVKKQTLGSDWPADAVKRIVDPEIYLAMKDALGKLKELPEDSARSLELPDGRFVEADDEVLFFPENAASILTPRGVAEIGGSIHHARLYGWLTKKGELKVGMLRVYGAEFPWLMRESGSRNVLSMPIHRGSQSFRDMQDTTRKAVESGEAVEFAWITQNDELEFDPDDYIAHGGKDELRQFLGFMPECRWRVDGFKKNYQIRIRPAMLSREQLPSDIQRRLESKTLTKNESLLLKALDTGLVVAIGGLLPLETLKVIRRNNLGFPRWRGNGNLPTSFEVRSSALRALGVEGSGGSSMSKTIKDLEEFAAEKLGYDIVFQESISMEPQEVEHLITTDEKSVLVNSTYDDNKEITISMISTPHPEYRPIALIIQDMEGEVQRKELGSGGSPKKKRKVGGSPKKKRKVGSG

SEQ ID NO: 1346 - protein, 1519 aa, unidentified
MAKGGVESGEELFENLDKSGNKEKLDTMWNTVLNHGYGYSELGGSLAKTTYLVCKIDGVPEPIIIGNDEGKHAEKQLVDILKEMTLLKNEVTVYINNSPCAACANEFKDYLEENEDIHLTLYVTHLYNIRRRSCQDKADTQNERHMKTIDKDEHVDNYKGLRDLMNLEDNRCKIEAFTEDVWRQLHEVMGLTEDCQQRMITYAETKITDPKNKEKNHDRSRKTEDINIKNDLIHLQKNVDPWHGIKKYYSACSGSETPGTSESATPESMSTDMKNYRIGVAVGDRSVGLAAIEFDDDGLPIQKLALVTFRHDGGLDPTKNKTPMSRKETRGIARRTMRMNRERKRRLRNLDNVLENLGYSVPEGPEPETYEAWTSRALLASIKLASADELNEHLVRAVRHMARHRGWANPWWSLDQLEKASQEPSETFEIILARARELFGEKVPANPTLGMLGALAANNEVLLRPRDEKKRKTGYVRGTPLMFAQVRQGDQLAELRRICEVQGIEDQYEALRLGVFDHKHPYVPKERVGKDPLNPSTNRTIRASLEFQEFRILDSVANLRVRIGSRAKRELTEAEYDAAVEFLMDYADKEQPSWADVAEKIGVPGNRLVAPVLEDVQQKTAPYDRSSAAFEKAMGKKTEARQWWESTDDDQLRSLLIAFLVDATNDTEEAAAEAGLSELYKSWPAEEREALSNIDFEKGRVAYSQETLSKLSEYMHEYRVGLHEARKAVFGVDDTWRPPLDKLEEPTGQPAVDRVLTILRRFVLDCERQWGRPRAITVEHTRTGLMGPTQRQKILNEQKKNRADNERIRDELRESGVDNPSRAEVRRHLIVQEQECQCLYCGTMITTTTSELDHIVPRAGGGSSRRENLAAVCRACNAKKKRELFYAWAGPVKSQETIERVRQLKAFKDSKKAKMFKNQIRRLNQTEADEPIDERSLASTSYAAVAVRERLEQHFNEGLALDDKSRVVLDVYAGAVTRESRRAGGIDERILLRGERDKNRFDVRHHAVDAAVMTLLNRSVALTLEQRSQLRRTFYEQGLDKLDRNQLKPEEDWRDFTGLAPASQEKFLEWRKAATILGDLLAEAIEDDSIAVVSPLRLRPQNGSVHLETISAVKKQTLGSDWPADAVKRIVDPEIYLAMKDALGKLKELPEDSARSLELPDGRFVEADDEVLFFPENAASILTPRGVAEIGGSIHHARLYGWLTKKGELKVGMLRVYGAEFPWLMRESGSRNVLSMPIHRGSQSFRDMQDTTRKAVESGEAVEFAWITQNDELEFDPDDYIAHGGKDELRQFLGFMPECRWRVDGFKKNYQIRIRPAMLSREQLPSDIQRRLESKTLTKNESLLLKALDTGLVVAIGGLLPLETLKVIRRNNLGFPRWRGNGNLPTSFEVRSSALRALGVEGSGGSSMSKTIKDLEEFAAEKLGYDIVFQESISMEPQEVEHLITTDEKSVLVNSTYDDNKEITISMISTPHPEYRPIALIIQDMEGEVQRKELGSGGSPKKKRKVGGSPKKKRKVGSG

SEQ ID NO: 1347 - protein, 1442 aa, unidentified
MDDELECFLFSGNYGNLNANWPHRTVMVFRSTINGTPGVYQVIHNDPQNDHAEIIFINQVNIPPEATEIEIEMFISYSPCNTCADALIVWINNLTMQVSIAIKFFSFYKNETRGLILLSQVDGITLDVFRGEEAWENFFQCIRRTDFTKYKKRIRKRKDREDVDDTKLQGIISACSGSETPGTSESATPESMSTDMKNYRIGVAVGDRSVGLAAIEFDDDGLPIQKLALVTFRHDGGLDPTKNKTPMSRKETRGIARRTMRMNRERKRRLRNLDNVLENLGYSVPEGPEPETYEAWTSRALLASIKLASADELNEHLVRAVRHMARHRGWANPWWSLDQLEKASQEPSETFEIILARARELFGEKVPANPTLGMLGALAANNEVLLRPRDEKKRKTGYVRGTPLMFAQVRQGDQLAELRRICEVQGIEDQYEALRLGVFDHKHPYVPKERVGKDPLNPSTNRTIRASLEFQEFRILDSVANLRVRIGSRAKRELTEAEYDAAVEFLMDYADKEQPSWADVAEKIGVPGNRLVAPVLEDVQQKTAPYDRSSAAFEKAMGKKTEARQWWESTDDDQLRSLLIAFLVDATNDTEEAAAEAGLSELYKSWPAEEREALSNIDFEKGRVAYSQETLSKLSEYMHEYRVGLHEARKAVFGVDDTWRPPLDKLEEPTGQPAVDRVLTILRRFVLDCERQWGRPRAITVEHTRTGLMGPTQRQKILNEQKKNRADNERIRDELRESGVDNPSRAEVRRHLIVQEQECQCLYCGTMITTTTSELDHIVPRAGGGSSRRENLAAVCRACNAKKKRELFYAWAGPVKSQETIERVRQLKAFKDSKKAKMFKNQIRRLNQTEADEPIDERSLASTSYAAVAVRERLEQHFNEGLALDDKSRVVLDVYAGAVTRESRRAGGIDERILLRGERDKNRFDVRHHAVDAAVMTLLNRSVALTLEQRSQLRRTFYEQGLDKLDRNQLKPEEDWRDFTGLAPASQEKFLEWRKAATILGDLLAEAIEDDSIAVVSPLRLRPQNGSVHLETISAVKKQTLGSDWPADAVKRIVDPEIYLAMKDALGKLKELPEDSARSLELPDGRFVEADDEVLFFPENAASILTPRGVAEIGGSIHHARLYGWLTKKGELKVGMLRVYGAEFPWLMRESGSRNVLSMPIHRGSQSFRDMQDTTRKAVESGEAVEFAWITQNDELEFDPDDYIAHGGKDELRQFLGFMPECRWRVDGFKKNYQIRIRPAMLSREQLPSDIQRRLESKTLTKNESLLLKALDTGLVVAIGGLLPLETLKVIRRNNLGFPRWRGNGNLPTSFEVRSSALRALGVEGSGGSSMSKTIKDLEEFAAEKLGYDIVFQESISMEPQEVEHLITTDEKSVLVNSTYDDNKEITISMISTPHPEYRPIALIIQDMEGEVQRKELGSGGSPKKKRKVGGSPKKKRKVGSG

SEQ ID NO: 1348 - protein, 1498 aa, unidentified
MSSETGPAVVDPTLRRRIEPQEFEVFFDPRELRKETCLLYEISWGGRRSIWRHTSRNTDKHVEINFIEKLTSQRSFRPSARCSITWFLSWSPCGECSKAITEFLSQHPNVTLFIYVARLYHHMDPGNRQGLRNLICRGVTVQIMTEQEYCYCWKNFVNYPPSNEVYWPRFPNVWMRLYMLELLCIILGLPPCLRILRRNQRHDTLFTLVFQRCHYQRIPPPIIWARGMSACSGSETPGTSESATPESMSTDMKNYRIGVAVGDRSVGLAAIEFDDDGLPIQKLALVTFRHDGGLDPTKNKTPMSRKETRGIARRTMRMNRERKRRLRNLDNVLENLGYSVPEGPEPETYEAWTSRALLASIKLASADELNEHLVRAVRHMARHRGWANPWWSLDQLEKASQEPSETFEIILARARELFGEKVPANPTLGMLGALAANNEVLLRPRDEKKRKTGYVRGTPLMFAQVRQGDQLAELRRICEVQGIEDQYEALRLGVFDHKHPYVPKERVGKDPLNPSTNRTIRASLEFQEFRILDSVANLRVRIGSRAKRELTEAEYDAAVEFLMDYADKEQPSWADVAEKIGVPGNRLVAPVLEDVQQKTAPYDRSSAAFEKAMGKKTEARQWWESTDDDQLRSLLIAFLVDATNDTEEAAAEAGLSELYKSWPAEEREALSNIDFEKGRVAYSQETLSKLSEYMHEYRVGLHEARKAVFGVDDTWRPPLDKLEEPTGQPAVDRVLTILRRFVLDCERQWGRPRAITVEHTRTGLMGPTQRQKILNEQKKNRADNERIRDELRESGVDNPSRAEVRRHLIVQEQECQCLYCGTMITTTTSELDHIVPRAGGGSSRRENLAAVCRACNAKKKRELFYAWAGPVKSQETIERVRQLKAFKDSKKAKMFKNQIRRLNQTEADEPIDERSLASTSYAAVAVRERLEQHFNEGLALDDKSRVVLDVYAGAVTRESRRAGGIDERILLRGERDKNRFDVRHHAVDAAVMTLLNRSVALTLEQRSQLRRTFYEQGLDKLDRNQLKPEEDWRDFTGLAPASQEKFLEWRKAATILGDLLAEAIEDDSIAVVSPLRLRPQNGSVHLETISAVKKQTLGSDWPADAVKRIVDPEIYLAMKDALGKLKELPEDSARSLELPDGRFVEADDEVLFFPENAASILTPRGVAEIGGSIHHARLYGWLTKKGELKVGMLRVYGAEFPWLMRESGSRNVLSMPIHRGSQSFRDMQDTTRKAVESGEAVEFAWITQNDELEFDPDDYIAHGGKDELRQFLGFMPECRWRVDGFKKNYQIRIRPAMLSREQLPSDIQRRLESKTLTKNESLLLKALDTGLVVAIGGLLPLETLKVIRRNNLGFPRWRGNGNLPTSFEVRSSALRALGVEGSGGSSMSKTIKDLEEFAAEKLGYDIVFQESISMEPQEVEHLITTDEKSVLVNSTYDDNKEITISMISTPHPEYRPIALIIQDMEGEVQRKELGSGGSPKKKRKVGGSPKKKRKVGSG

SEQ ID NO: 1349 - protein, 1498 aa, unidentified
MSSQTGPAVVDPTLRRRIEPQDFEAFFDPRELRKETCLLYEISWGGRHNTWRHTSRNTDKHVEINFIKKLTSERSFRPSARCSITWFLSWSPCWECSKAITEFLSQHPNVTLFIYVARLYHHMDPGNRQGLRNLVCRGVTVQIMTEQEYCYCWKNFVNYPPSNEVYWPRFPNVWMKLYILELLCIILGLPPCLRILRRNQCQATLFTLVFQGCHFQRIPPPIFWATGMSACSGSETPGTSESATPESMSTDMKNYRIGVAVGDRSVGLAAIEFDDDGLPIQKLALVTFRHDGGLDPTKNKTPMSRKETRGIARRTMRMNRERKRRLRNLDNVLENLGYSVPEGPEPETYEAWTSRALLASIKLASADELNEHLVRAVRHMARHRGWANPWWSLDQLEKASQEPSETFEIILARARELFGEKVPANPTLGMLGALAANNEVLLRPRDEKKRKTGYVRGTPLMFAQVRQGDQLAELRRICEVQGIEDQYEALRLGVFDHKHPYVPKERVGKDPLNPSTNRTIRASLEFQEFRILDSVANLRVRIGSRAKRELTEAEYDAAVEFLMDYADKEQPSWADVAEKIGVPGNRLVAPVLEDVQQKTAPYDRSSAAFEKAMGKKTEARQWWESTDDDQLRSLLIAFLVDATNDTEEAAAEAGLSELYKSWPAEEREALSNIDFEKGRVAYSQETLSKLSEYMHEYRVGLHEARKAVFGVDDTWRPPLDKLEEPTGQPAVDRVLTILRRFVLDCERQWGRPRAITVEHTRTGLMGPTQRQKILNEQKKNRADNERIRDELRESGVDNPSRAEVRRHLIVQEQECQCLYCGTMITTTTSELDHIVPRAGGGSSRRENLAAVCRACNAKKKRELFYAWAGPVKSQETIERVRQLKAFKDSKKAKMFKNQIRRLNQTEADEPIDERSLASTSYAAVAVRERLEQHFNEGLALDDKSRVVLDVYAGAVTRESRRAGGIDERILLRGERDKNRFDVRHHAVDAAVMTLLNRSVALTLEQRSQLRRTFYEQGLDKLDRNQLKPEEDWRDFTGLAPASQEKFLEWRKAATILGDLLAEAIEDDSIAVVSPLRLRPQNGSVHLETISAVKKQTLGSDWPADAVKRIVDPEIYLAMKDALGKLKELPEDSARSLELPDGRFVEADDEVLFFPENAASILTPRGVAEIGGSIHHARLYGWLTKKGELKVGMLRVYGAEFPWLMRESGSRNVLSMPIHRGSQSFRDMQDTTRKAVESGEAVEFAWITQNDELEFDPDDYIAHGGKDELRQFLGFMPECRWRVDGFKKNYQIRIRPAMLSREQLPSDIQRRLESKTLTKNESLLLKALDTGLVVAIGGLLPLETLKVIRRNNLGFPRWRGNGNLPTSFEVRSSALRALGVEGSGGSSMSKTIKDLEEFAAEKLGYDIVFQESISMEPQEVEHLITTDEKSVLVNSTYDDNKEITISMISTPHPEYRPIALIIQDMEGEVQRKELGSGGSPKKKRKVGGSPKKKRKVGSG

SEQ ID NO: 1350 - protein, 1506 aa, unidentified
MTSEKGPSTGDATLRRRIEPWEFEVFFNPGELRKETCMFYEIKWGTSQKIWRNSSKNTTNHVEVNFIEKFTAERHFCPSISCSITWFLSWSPCWECSKAIREFLSQHPNTTLVIYTARLFQHMDQQNRQGLRDLINSGVTVQIMTISEYCYCWRNFVNYSPKEETHWPKYQPLLMMLYALELHCIILSLPPCLKISRRYQKQLTFFNLILQNCHYQTIPPHILLSLGLIQPSVTWRSACSGSETPGTSESATPESMSTDMKNYRIGVAVGDRSVGLAAIEFDDDGLPIQKLALVTFRHDGGLDPTKNKTPMSRKETRGIARRTMRMNRERKRRLRNLDNVLENLGYSVPEGPEPETYEAWTSRALLASIKLASADELNEHLVRAVRHMARHRGWANPWWSLDQLEKASQEPSETFEIILARARELFGEKVPANPTLGMLGALAANNEVLLRPRDEKKRKTGYVRGTPLMFAQVRQGDQLAELRRICEVQGIEDQYEALRLGVFDHKHPYVPKERVGKDPLNPSTNRTIRASLEFQEFRILDSVANLRVRIGSRAKRELTEAEYDAAVEFLMDYADKEQPSWADVAEKIGVPGNRLVAPVLEDVQQKTAPYDRSSAAFEKAMGKKTEARQWWESTDDDQLRSLLIAFLVDATNDTEEAAAEAGLSELYKSWPAEEREALSNIDFEKGRVAYSQETLSKLSEYMHEYRVGLHEARKAVFGVDDTWRPPLDKLEEPTGQPAVDRVLTILRRFVLDCERQWGRPRAITVEHTRTGLMGPTQRQKILNEQKKNRADNERIRDELRESGVDNPSRAEVRRHLIVQEQECQCLYCGTMITTTTSELDHIVPRAGGGSSRRENLAAVCRACNAKKKRELFYAWAGPVKSQETIERVRQLKAFKDSKKAKMFKNQIRRLNQTEADEPIDERSLASTSYAAVAVRERLEQHFNEGLALDDKSRVVLDVYAGAVTRESRRAGGIDERILLRGERDKNRFDVRHHAVDAAVMTLLNRSVALTLEQRSQLRRTFYEQGLDKLDRNQLKPEEDWRDFTGLAPASQEKFLEWRKAATILGDLLAEAIEDDSIAVVSPLRLRPQNGSVHLETISAVKKQTLGSDWPADAVKRIVDPEIYLAMKDALGKLKELPEDSARSLELPDGRFVEADDEVLFFPENAASILTPRGVAEIGGSIHHARLYGWLTKKGELKVGMLRVYGAEFPWLMRESGSRNVLSMPIHRGSQSFRDMQDTTRKAVESGEAVEFAWITQNDELEFDPDDYIAHGGKDELRQFLGFMPECRWRVDGFKKNYQIRIRPAMLSREQLPSDIQRRLESKTLTKNESLLLKALDTGLVVAIGGLLPLETLKVIRRNNLGFPRWRGNGNLPTSFEVRSSALRALGVEGSGGSSMSKTIKDLEEFAAEKLGYDIVFQESISMEPQEVEHLITTDEKSVLVNSTYDDNKEITISMISTPHPEYRPIALIIQDMEGEVQRKELGSGGSPKKKRKVGGSPKKKRKVGSG

SEQ ID NO: 1351 - protein, 1475 aa, unidentified
MERSSGRDWLDECCPRGCKYTSNYRGPMKGLFQKAFYFHFENLHYADHRRKTFLCFEVTRLQDNKFRKGMFINQVGPYRLHAELRFLSWFHDSWLCPYASYEVTWYMSWSPCEECMEELAAFLANHRNVTLTIYVARLYYYQEPTCGEGLQALLNEGASVNIMFFRDFLDCWRRFVYNGNEYFEPWPHLHQNSLKYFHILEELLESACSGSETPGTSESATPESMSTDMKNYRIGVAVGDRSVGLAAIEFDDDGLPIQKLALVTFRHDGGLDPTKNKTPMSRKETRGIARRTMRMNRERKRRLRNLDNVLENLGYSVPEGPEPETYEAWTSRALLASIKLASADELNEHLVRAVRHMARHRGWANPWWSLDQLEKASQEPSETFEIILARARELFGEKVPANPTLGMLGALAANNEVLLRPRDEKKRKTGYVRGTPLMFAQVRQGDQLAELRRICEVQGIEDQYEALRLGVFDHKHPYVPKERVGKDPLNPSTNRTIRASLEFQEFRILDSVANLRVRIGSRAKRELTEAEYDAAVEFLMDYADKEQPSWADVAEKIGVPGNRLVAPVLEDVQQKTAPYDRSSAAFEKAMGKKTEARQWWESTDDDQLRSLLIAFLVDATNDTEEAAAEAGLSELYKSWPAEEREALSNIDFEKGRVAYSQETLSKLSEYMHEYRVGLHEARKAVFGVDDTWRPPLDKLEEPTGQPAVDRVLTILRRFVLDCERQWGRPRAITVEHTRTGLMGPTQRQKILNEQKKNRADNERIRDELRESGVDNPSRAEVRRHLIVQEQECQCLYCGTMITTTTSELDHIVPRAGGGSSRRENLAAVCRACNAKKKRELFYAWAGPVKSQETIERVRQLKAFKDSKKAKMFKNQIRRLNQTEADEPIDERSLASTSYAAVAVRERLEQHFNEGLALDDKSRVVLDVYAGAVTRESRRAGGIDERILLRGERDKNRFDVRHHAVDAAVMTLLNRSVALTLEQRSQLRRTFYEQGLDKLDRNQLKPEEDWRDFTGLAPASQEKFLEWRKAATILGDLLAEAIEDDSIAVVSPLRLRPQNGSVHLETISAVKKQTLGSDWPADAVKRIVDPEIYLAMKDALGKLKELPEDSARSLELPDGRFVEADDEVLFFPENAASILTPRGVAEIGGSIHHARLYGWLTKKGELKVGMLRVYGAEFPWLMRESGSRNVLSMPIHRGSQSFRDMQDTTRKAVESGEAVEFAWITQNDELEFDPDDYIAHGGKDELRQFLGFMPECRWRVDGFKKNYQIRIRPAMLSREQLPSDIQRRLESKTLTKNESLLLKALDTGLVVAIGGLLPLETLKVIRRNNLGFPRWRGNGNLPTSFEVRSSALRALGVEGSGGSSMSKTIKDLEEFAAEKLGYDIVFQESISMEPQEVEHLITTDEKSVLVNSTYDDNKEITISMISTPHPEYRPIALIIQDMEGEVQRKELGSGGSPKKKRKVGGSPKKKRKVGSG

SEQ ID NO: 1352 - protein, 1644 aa, unidentified
MYRRKMRGMYISKRALRIHFDPCKFPKETYLLCELQWRGSTKFWQHWVRNDHDYEDCHAEQYFLDEVFEPRSYNICDMTWYLSWSPCRECCDIIRDFLEEQPNVNIDIRVARLYYTNIPRYRDGLRELHSLEGVTIKAMEAEDYNYCWETFIQPGVNYYFSPNNFKSEIQRNRTKLEDILQGLHLYARITVLLVLFFRWKMQPRDFQRNYSPRQNGRVYLLYEIRWRRGSIWRNWCSNNHEQHAEVNFLENHFSVRPQTPCSITWFLSTSPCGKCSRRILEFLRSHPNVTLVIYAAKLFRHHDNRNRQGLRNLIMNGVTLRIMNLEDYRYCWRNFVAYQTGEDDYWPQNVTLYFLLNSTELLHIFWGLPPFLANSACSGSETPGTSESATPESMSTDMKNYRIGVAVGDRSVGLAAIEFDDDGLPIQKLALVTFRHDGGLDPTKNKTPMSRKETRGIARRTMRMNRERKRRLRNLDNVLENLGYSVPEGPEPETYEAWTSRALLASIKLASADELNEHLVRAVRHMARHRGWANPWWSLDQLEKASQEPSETFEIILARARELFGEKVPANPTLGMLGALAANNEVLLRPRDEKKRKTGYVRGTPLMFAQVRQGDQLAELRRICEVQGIEDQYEALRLGVFDHKHPYVPKERVGKDPLNPSTNRTIRASLEFQEFRILDSVANLRVRIGSRAKRELTEAEYDAAVEFLMDYADKEQPSWADVAEKIGVPGNRLVAPVLEDVQQKTAPYDRSSAAFEKAMGKKTEARQWWESTDDDQLRSLLIAFLVDATNDTEEAAAEAGLSELYKSWPAEEREALSNIDFEKGRVAYSQETLSKLSEYMHEYRVGLHEARKAVFGVDDTWRPPLDKLEEPTGQPAVDRVLTILRRFVLDCERQWGRPRAITVEHTRTGLMGPTQRQKILNEQKKNRADNERIRDELRESGVDNPSRAEVRRHLIVQEQECQCLYCGTMITTTTSELDHIVPRAGGGSSRRENLAAVCRACNAKKKRELFYAWAGPVKSQETIERVRQLKAFKDSKKAKMFKNQIRRLNQTEADEPIDERSLASTSYAAVAVRERLEQHFNEGLALDDKSRVVLDVYAGAVTRESRRAGGIDERILLRGERDKNRFDVRHHAVDAAVMTLLNRSVALTLEQRSQLRRTFYEQGLDKLDRNQLKPEEDWRDFTGLAPASQEKFLEWRKAATILGDLLAEAIEDDSIAVVSPLRLRPQNGSVHLETISAVKKQTLGSDWPADAVKRIVDPEIYLAMKDALGKLKELPEDSARSLELPDGRFVEADDEVLFFPENAASILTPRGVAEIGGSIHHARLYGWLTKKGELKVGMLRVYGAEFPWLMRESGSRNVLSMPIHRGSQSFRDMQDTTRKAVESGEAVEFAWITQNDELEFDPDDYIAHGGKDELRQFLGFMPECRWRVDGFKKNYQIRIRPAMLSREQLPSDIQRRLESKTLTKNESLLLKALDTGLVVAIGGLLPLETLKVIRRNNLGFPRWRGNGNLPTSFEVRSSALRALGVEGSGGSSMSKTIKDLEEFAAEKLGYDIVFQESISMEPQEVEHLITTDEKSVLVNSTYDDNKEITISMISTPHPEYRPIALIIQDMEGEVQRKELGSGGSPKKKRKVGGSPKKKRKVGSG

SEQ ID NO: 1353 - protein, 1601 aa, unidentified
MAEGGQDLKFDFEFMKILLETGIDNCWPRFTNLIVDISDGELTWKRIYQTSDSHTESQMLDDKEFKAKFKVEEDKADKITDTEKTKKTDKAEKVYKTEMVIKAEKVGKAEKVDKTEKVDKTEKVDKTEKVDKTEKVDKTEKVDKTENVDKTEKVDKTENVDKAEKIDKPEEVDIILTSNYSPCRECAVKLIDFYEEKKGLIRNFIIRFSRLYRITEQENKDGLKDLNRAGNSAGITLEAMTEKSWCDVLMTDKSWLDSMSTQQKSSFEKMMNEKDCFDKVMKLFGLVPNKVKQRDAATSKDLTDLLAQDKKTQDSRLKQIISSKTRHRHKKSACSGSETPGTSESATPESMSTDMKNYRIGVAVGDRSVGLAAIEFDDDGLPIQKLALVTFRHDGGLDPTKNKTPMSRKETRGIARRTMRMNRERKRRLRNLDNVLENLGYSVPEGPEPETYEAWTSRALLASIKLASADELNEHLVRAVRHMARHRGWANPWWSLDQLEKASQEPSETFEIILARARELFGEKVPANPTLGMLGALAANNEVLLRPRDEKKRKTGYVRGTPLMFAQVRQGDQLAELRRICEVQGIEDQYEALRLGVFDHKHPYVPKERVGKDPLNPSTNRTIRASLEFQEFRILDSVANLRVRIGSRAKRELTEAEYDAAVEFLMDYADKEQPSWADVAEKIGVPGNRLVAPVLEDVQQKTAPYDRSSAAFEKAMGKKTEARQWWESTDDDQLRSLLIAFLVDATNDTEEAAAEAGLSELYKSWPAEEREALSNIDFEKGRVAYSQETLSKLSEYMHEYRVGLHEARKAVFGVDDTWRPPLDKLEEPTGQPAVDRVLTILRRFVLDCERQWGRPRAITVEHTRTGLMGPTQRQKILNEQKKNRADNERIRDELRESGVDNPSRAEVRRHLIVQEQECQCLYCGTMITTTTSELDHIVPRAGGGSSRRENLAAVCRACNAKKKRELFYAWAGPVKSQETIERVRQLKAFKDSKKAKMFKNQIRRLNQTEADEPIDERSLASTSYAAVAVRERLEQHFNEGLALDDKSRVVLDVYAGAVTRESRRAGGIDERILLRGERDKNRFDVRHHAVDAAVMTLLNRSVALTLEQRSQLRRTFYEQGLDKLDRNQLKPEEDWRDFTGLAPASQEKFLEWRKAATILGDLLAEAIEDDSIAVVSPLRLRPQNGSVHLETISAVKKQTLGSDWPADAVKRIVDPEIYLAMKDALGKLKELPEDSARSLELPDGRFVEADDEVLFFPENAASILTPRGVAEIGGSIHHARLYGWLTKKGELKVGMLRVYGAEFPWLMRESGSRNVLSMPIHRGSQSFRDMQDTTRKAVESGEAVEFAWITQNDELEFDPDDYIAHGGKDELRQFLGFMPECRWRVDGFKKNYQIRIRPAMLSREQLPSDIQRRLESKTLTKNESLLLKALDTGLVVAIGGLLPLETLKVIRRNNLGFPRWRGNGNLPTSFEVRSSALRALGVEGSGGSSMSKTIKDLEEFAAEKLGYDIVFQESISMEPQEVEHLITTDEKSVLVNSTYDDNKEITISMISTPHPEYRPIALIIQDMEGEVQRKELGSGGSPKKKRKVGGSPKKKRKVGSG

SEQ ID NO: 1354 - protein, 1449 aa, unidentified
MRKETGMYISKAALKHNFNPHETPKDTYLLCKLQWGETGTPWIHWVRNERYHHAESYFLEKIFKMRRSSNYVKCNITWYLSWSPCADCCHKILNFLKRHSNVNIDIYVARLYYIEDEEIRQCLKNLVSLAEVTIAVMKIEDYIYCQKKFIQGGDDDDSWTVSFQPEISKNRLKLKDVFESACSGSETPGTSESATPESMSTDMKNYRIGVAVGDRSVGLAAIEFDDDGLPIQKLALVTFRHDGGLDPTKNKTPMSRKETRGIARRTMRMNRERKRRLRNLDNVLENLGYSVPEGPEPETYEAWTSRALLASIKLASADELNEHLVRAVRHMARHRGWANPWWSLDQLEKASQEPSETFEIILARARELFGEKVPANPTLGMLGALAANNEVLLRPRDEKKRKTGYVRGTPLMFAQVRQGDQLAELRRICEVQGIEDQYEALRLGVFDHKHPYVPKERVGKDPLNPSTNRTIRASLEFQEFRILDSVANLRVRIGSRAKRELTEAEYDAAVEFLMDYADKEQPSWADVAEKIGVPGNRLVAPVLEDVQQKTAPYDRSSAAFEKAMGKKTEARQWWESTDDDQLRSLLIAFLVDATNDTEEAAAEAGLSELYKSWPAEEREALSNIDFEKGRVAYSQETLSKLSEYMHEYRVGLHEARKAVFGVDDTWRPPLDKLEEPTGQPAVDRVLTILRRFVLDCERQWGRPRAITVEHTRTGLMGPTQRQKILNEQKKNRADNERIRDELRESGVDNPSRAEVRRHLIVQEQECQCLYCGTMITTTTSELDHIVPRAGGGSSRRENLAAVCRACNAKKKRELFYAWAGPVKSQETIERVRQLKAFKDSKKAKMFKNQIRRLNQTEADEPIDERSLASTSYAAVAVRERLEQHFNEGLALDDKSRVVLDVYAGAVTRESRRAGGIDERILLRGERDKNRFDVRHHAVDAAVMTLLNRSVALTLEQRSQLRRTFYEQGLDKLDRNQLKPEEDWRDFTGLAPASQEKFLEWRKAATILGDLLAEAIEDDSIAVVSPLRLRPQNGSVHLETISAVKKQTLGSDWPADAVKRIVDPEIYLAMKDALGKLKELPEDSARSLELPDGRFVEADDEVLFFPENAASILTPRGVAEIGGSIHHARLYGWLTKKGELKVGMLRVYGAEFPWLMRESGSRNVLSMPIHRGSQSFRDMQDTTRKAVESGEAVEFAWITQNDELEFDPDDYIAHGGKDELRQFLGFMPECRWRVDGFKKNYQIRIRPAMLSREQLPSDIQRRLESKTLTKNESLLLKALDTGLVVAIGGLLPLETLKVIRRNNLGFPRWRGNGNLPTSFEVRSSALRALGVEGSGGSSMSKTIKDLEEFAAEKLGYDIVFQESISMEPQEVEHLITTDEKSVLVNSTYDDNKEITISMISTPHPEYRPIALIIQDMEGEVQRKELGSGGSPKKKRKVGGSPKKKRKVGSG

SEQ ID NO: 1355 - protein, 1535 aa, unidentified
MYIINSRIKRLVLLGTRMLQIVYCVFYLHSFLSGSVTFLEFDLRIYPYFYILMIILFSFFFVLFCFLDDFLNELLWTGVRDTKLPNRTYLIASIKSKDGEDIFNKRFKNEPFLKHAEAVMLCDDDFGDAVAVHHDIEITLTLNYSPCSSCACELKKFYEKNRNIRNPIIQFSFLYRIEEEKNQHGLRNLREAGITLQAMNANSWREVGIDLELMALEDKEIITERDEDQADMLNKVLSTYESEHDQDTSNDDELSSLFQSQLKFLSACSGSETPGTSESATPESMSTDMKNYRIGVAVGDRSVGLAAIEFDDDGLPIQKLALVTFRHDGGLDPTKNKTPMSRKETRGIARRTMRMNRERKRRLRNLDNVLENLGYSVPEGPEPETYEAWTSRALLASIKLASADELNEHLVRAVRHMARHRGWANPWWSLDQLEKASQEPSETFEIILARARELFGEKVPANPTLGMLGALAANNEVLLRPRDEKKRKTGYVRGTPLMFAQVRQGDQLAELRRICEVQGIEDQYEALRLGVFDHKHPYVPKERVGKDPLNPSTNRTIRASLEFQEFRILDSVANLRVRIGSRAKRELTEAEYDAAVEFLMDYADKEQPSWADVAEKIGVPGNRLVAPVLEDVQQKTAPYDRSSAAFEKAMGKKTEARQWWESTDDDQLRSLLIAFLVDATNDTEEAAAEAGLSELYKSWPAEEREALSNIDFEKGRVAYSQETLSKLSEYMHEYRVGLHEARKAVFGVDDTWRPPLDKLEEPTGQPAVDRVLTILRRFVLDCERQWGRPRAITVEHTRTGLMGPTQRQKILNEQKKNRADNERIRDELRESGVDNPSRAEVRRHLIVQEQECQCLYCGTMITTTTSELDHIVPRAGGGSSRRENLAAVCRACNAKKKRELFYAWAGPVKSQETIERVRQLKAFKDSKKAKMFKNQIRRLNQTEADEPIDERSLASTSYAAVAVRERLEQHFNEGLALDDKSRVVLDVYAGAVTRESRRAGGIDERILLRGERDKNRFDVRHHAVDAAVMTLLNRSVALTLEQRSQLRRTFYEQGLDKLDRNQLKPEEDWRDFTGLAPASQEKFLEWRKAATILGDLLAEAIEDDSIAVVSPLRLRPQNGSVHLETISAVKKQTLGSDWPADAVKRIVDPEIYLAMKDALGKLKELPEDSARSLELPDGRFVEADDEVLFFPENAASILTPRGVAEIGGSIHHARLYGWLTKKGELKVGMLRVYGAEFPWLMRESGSRNVLSMPIHRGSQSFRDMQDTTRKAVESGEAVEFAWITQNDELEFDPDDYIAHGGKDELRQFLGFMPECRWRVDGFKKNYQIRIRPAMLSREQLPSDIQRRLESKTLTKNESLLLKALDTGLVVAIGGLLPLETLKVIRRNNLGFPRWRGNGNLPTSFEVRSSALRALGVEGSGGSSMSKTIKDLEEFAAEKLGYDIVFQESISMEPQEVEHLITTDEKSVLVNSTYDDNKEITISMISTPHPEYRPIALIIQDMEGEVQRKELGSGGSPKKKRKVGGSPKKKRKVGSG

SEQ ID NO: 1356 - protein, 972 aa, unidentified
MTDSQNDTDEYWMGEALKLAQKAWDEGEVPVGAILVRKGEVIGHGWNRSIGSHDPSAHAEIMAIREAGVRIGNYRMLDTVLYVTLEPCAMCAGALVHGRISRLVFGAEDPKTGACGSVMDIARHPALNHQLQVDGGVMAAPCARLLSDFFRWRRAQKKAARDNSSGNGTSGGSSGGSSGSETPGTSESATPESSGGSSGGSMERELVLGIAYGGKYTGLAVVDRRHNQVLYANRLKMRDDVAGILKDRRKQRGIRRTAQTKKKRLRELKNYLKSIGYNESTATFETVYSLAHKRGYDYADMPEEKTSEEIEAMDVEERKQWEKEKQEWEETKRNSRHRKEVVKDVHKAMIEGRATEEQIKRVERIFNKQYRPKRFNNRILTKCKVEDCGVNTPLRKNVRDLLIENIVRFFPIEQSEKDNLKDAVLDKNRREEVKSFFRKHKTDEHIRKQVYDIADNKLSGRTVFCKEHILEHTEHSKEERKVFRLAPSLKTKIENVLAVIKDEILPKFTVNKVVMESNNFDIAAKTQGKKRLAKEEYGKGPREGKETRKEALLRETDGRCIYCGKSIDISNAHDDHIFPRKAGGLNIFANLVACCAVCNENKKGRTPLESGISPKPEIIAFMKNDLKKKILEDARNINTVDFNKYMSHASIGWRYMRDRLRESAGNKKLPIERQSGIYTAYFRRWWGFKKERGNTLHHALDAVILASRKGYSDDGLVDMTLKPKYNKGGEFDPEKHLPEPIEFKMDKGSRGSALHDRNPLSYKKGIITRRFMVTEIECGKEDDVISETYREKLKEAFKRFDTKKGKCLTDKEAKEAGFCIKKNELVMSLKCSIKGTGPGQMIRINNNVFKTNVHNVGVDVYLDEKGKKKAYERKNPRLSKHFIEPPPQPNGRVSFTLKRRDMVTVEGEDAIYRIKKLGTSPTIEAVVGSDGKTRTVSATKLTKANSAELEEGADKRTADGSEFESPKKKRKV

SEQ ID NO: 1357 - protein, 972 aa, unidentified; identical to SEQ ID NO: 676

SEQ ID NO: 1358 - protein, 1172 aa, unidentified
MTDSQNDTDEYWMGEALKLAQKAWDEGEVPVGAILVRKGEVIGHGWNRSIGSHDPSAHAEIMAIREAGVRIGNYRMLDTVLYVTLEPCAMCAGALVHGRISRLVFGAENPKTGACGSVMDIARHPALNHQLQVDGGVMAAPCARLLSDFFRWRRAQKKAARDNSSGNSGGSSGGSSGSETPGTSESATPESSGGSSGGSAMTDSQNDTDEYWMGEALKLAQKAWDEGEVPVGAILVRKGEVIGHGWNRSIGSHDPSAHAEIMAIREAGVRIGNYRMLDTVLYVTLEPCAMCAGALVHGRISRLVFGAENPKTGACGSVMDIARHPALNHQLQVDGGVMAAPCARLLSDFFRWRRAQKKAARDNSSGNGTSGGSSGGSSGSETPGTSESATPESSGGSSGGSMERELVLGIAYGGKYTGLAVVDRRHNQVLYANRLKMRDDVAGILKDRRKQRGIRRTAQTKKKRLRELKNYLKSIGYNESTATFETVYSLAHKRGYDYADMPEEKTSEEIEAMDVEERKQWEKEKQEWEETKRNSRHRKEVVKDVHKAMIEGRATEEQIKRVERIFNKQYRPKRFNNRILTKCKVEDCGVNTPLRKNVRDLLIENIVRFFPIEQSEKDNLKDAVLDKNRREEVKSFFRKHKTDEHIRKQVYDIADNKLSGRTVFCKEHILEHTEHSKEERKVFRLAPSLKTKIENVLAVIKDEILPKFTVNKVVMESNNFDIAAKTQGKKRLAKEEYGKGPREGKETRKEALLRETDGRCIYCGKSIDISNAHDDHIFPRKAGGLNIFANLVACCAVCNENKKGRTPLESGISPKPEIIAFMKNDLKKKILEDARNINTVDFNKYMSHASIGWRYMRDRLRESAGNKKLPIERQSGIYTAYFRRWWGFKKERGNTLHHALDAVILASRKGYSDDGLVDMTLKPKYNKGGEFDPEKHLPEPIEFKMDKGSRGSALHDRNPLSYKKGIITRRFMVTEIECGKEDDVISETYREKLKEAFKRFDTKKGKCLTDKEAKEAGFCIKKNELVMSLKCSIKGTGPGQMIRINNNVFKTNVHNVGVDVYLDEKGKKKAYERKNPRLSKHFIEPPPQPNGRVSFTLKRRDMVTVEGEDAIYRIKKLGTSPTIEAVVGSDGKTRTVSATKLTKANSAELEEGADKRTADGSEFESPKKKRKV

SEQ ID NO: 1359 - protein, 1192 aa, unidentified
MTDSQNDTDEYWMGEALKLAQKAWDEGEVPVGAILVRKGEVIGHGWNRSIGSHDPSAHAEIMAIREAGVRIGNYRMLDTVLYVTLEPCAMCAGALVHGRISRLVFGAENPKTGACGSVMDIARHPALNHQLQVDGGVMAAPCARLLSDFFRWRRAQKKAARDNSSGNSSGGSSGGSSGGSSGGSSGSETPGTSESATPESSGGSSGGSSGGSSGGSSGSAMTDSQNDTDEYWMGEALKLAQKAWDEGEVPVGAILVRKGEVIGHGWNRSIGSHDPSAHAEIMAIREAGVRIGNYRMLDTVLYVTLEPCAMCAGALVHGRISRLVFGAENPKTGACGSVMDIARHPALNHQLQVDGGVMAAPCARLLSDFFRWRRAQKKAARDNSSGNGTSGGSSGGSSGSETPGTSESATPESSGGSSGGSMERELVLGIAYGGKYTGLAVVDRRHNQVLYANRLKMRDDVAGILKDRRKQRGIRRTAQTKKKRLRELKNYLKSIGYNESTATFETVYSLAHKRGYDYADMPEEKTSEEIEAMDVEERKQWEKEKQEWEETKRNSRHRKEVVKDVHKAMIEGRATEEQIKRVERIFNKQYRPKRFNNRILTKCKVEDCGVNTPLRKNVRDLLIENIVRFFPIEQSEKDNLKDAVLDKNRREEVKSFFRKHKTDEHIRKQVYDIADNKLSGRTVFCKEHILEHTEHSKEERKVFRLAPSLKTKIENVLAVIKDEILPKFTVNKVVMESNNFDIAAKTQGKKRLAKEEYGKGPREGKETRKEALLRETDGRCIYCGKSIDISNAHDDHIFPRKAGGLNIFANLVACCAVCNENKKGRTPLESGISPKPEIIAFMKNDLKKKILEDARNINTVDFNKYMSHASIGWRYMRDRLRESAGNKKLPIERQSGIYTAYFRRWWGFKKERGNTLHHALDAVILASRKGYSDDGLVDMTLKPKYNKGGEFDPEKHLPEPIEFKMDKGSRGSALHDRNPLSYKKGIITRRFMVTEIECGKEDDVISETYREKLKEAFKRFDTKKGKCLTDKEAKEAGFCIKKNELVMSLKCSIKGTGPGQMIRINNNVFKTNVHNVGVDVYLDEKGKKKAYERKNPRLSKHFIEPPPQPNGRVSFTLKRRDMVTVEGEDAIYRIKKLGTSPTIEAVVGSDGKTRTVSATKLTKANSAELEEGADKRTADGSEFESPKKKRKV

SEQ ID NO: 1360 - protein, 1204 aa, unidentified
MTDSQNDTDEYWMGEALKLAQKAWDEGEVPVGAILVRKGEVIGHGWNRSIGSHDPSAHAEIMAIREAGVRIGNYRMLDTVLYVTLEPCAMCAGALVHGRISRLVFGAENPKTGACGSVMDIARHPALNHQLQVDGGVMAAPCARLLSDFFRWRRAQKKAARDNSSGNSGGSSGGSSGSETPGTSESATPESSGGSSGGSSGGSSGGSSGSETPGTSESATPESSGGSSGGSAMTDSQNDTDEYWMGEALKLAQKAWDEGEVPVGAILVRKGEVIGHGWNRSIGSHDPSAHAEIMAIREAGVRIGNYRMLDTVLYVTLEPCAMCAGALVHGRISRLVFGAENPKTGACGSVMDIARHPALNHQLQVDGGVMAAPCARLLSDFFRWRRAQKKAARDNSSGNGTSGGSSGGSSGSETPGTSESATPESSGGSSGGSMERELVLGIAYGGKYTGLAVVDRRHNQVLYANRLKMRDDVAGILKDRRKQRGIRRTAQTKKKRLRELKNYLKSIGYNESTATFETVYSLAHKRGYDYADMPEEKTSEEIEAMDVEERKQWEKEKQEWEETKRNSRHRKEVVKDVHKAMIEGRATEEQIKRVERIFNKQYRPKRFNNRILTKCKVEDCGVNTPLRKNVRDLLIENIVRFFPIEQSEKDNLKDAVLDKNRREEVKSFFRKHKTDEHIRKQVYDIADNKLSGRTVFCKEHILEHTEHSKEERKVFRLAPSLKTKIENVLAVIKDEILPKFTVNKVVMESNNFDIAAKTQGKKRLAKEEYGKGPREGKETRKEALLRETDGRCIYCGKSIDISNAHDDHIFPRKAGGLNIFANLVACCAVCNENKKGRTPLESGISPKPEIIAFMKNDLKKKILEDARNINTVDFNKYMSHASIGWRYMRDRLRESAGNKKLPIERQSGIYTAYFRRWWGFKKERGNTLHHALDAVILASRKGYSDDGLVDMTLKPKYNKGGEFDPEKHLPEPIEFKMDKGSRGSALHDRNPLSYKKGIITRRFMVTEIECGKEDDVISETYREKLKEAFKRFDTKKGKCLTDKEAKEAGFCIKKNELVMSLKCSIKGTGPGQMIRINNNVFKTNVHNVGVDVYLDEKGKKKAYERKNPRLSKHFIEPPPQPNGRVSFTLKRRDMVTVEGEDAIYRIKKLGTSPTIEAVVGSDGKTRTVSATKLTKANSAELEEGADKRTADGSEFESPKKKRKV

SEQ ID NO: 1361 - protein, 1145 aa, unidentified
MTDSQNDTDEYWMGEALKLAQKAWDEGEVPVGAILVRKGEVIGHGWNRSIGSHDPSAHAEIMAIREAGVRIGNYRMLDTVLYVTLEPCAMCAGALVHGRISRLVFGAENPKTGACGSVMDIARHPALNHQLQVDGGVMAAPCARLLSDFFRWRRAQKKAARDNSSGNGGGGSAMTDSQNDTDEYWMGEALKLAQKAWDEGEVPVGAILVRKGEVIGHGWNRSIGSHDPSAHAEIMAIREAGVRIGNYRMLDTVLYVTLEPCAMCAGALVHGRISRLVFGAENPKTGACGSVMDIARHPALNHQLQVDGGVMAAPCARLLSDFFRWRRAQKKAARDNSSGNGTSGGSSGGSSGSETPGTSESATPESSGGSSGGSMERELVLGIAYGGKYTGLAVVDRRHNQVLYANRLKMRDDVAGILKDRRKQRGIRRTAQTKKKRLRELKNYLKSIGYNESTATFETVYSLAHKRGYDYADMPEEKTSEEIEAMDVEERKQWEKEKQEWEETKRNSRHRKEVVKDVHKAMIEGRATEEQIKRVERIFNKQYRPKRFNNRILTKCKVEDCGVNTPLRKNVRDLLIENIVRFFPIEQSEKDNLKDAVLDKNRREEVKSFFRKHKTDEHIRKQVYDIADNKLSGRTVFCKEHILEHTEHSKEERKVFRLAPSLKTKIENVLAVIKDEILPKFTVNKVVMESNNFDIAAKTQGKKRLAKEEYGKGPREGKETRKEALLRETDGRCIYCGKSIDISNAHDDHIFPRKAGGLNIFANLVACCAVCNENKKGRTPLESGISPKPEIIAFMKNDLKKKILEDARNINTVDFNKYMSHASIGWRYMRDRLRESAGNKKLPIERQSGIYTAYFRRWWGFKKERGNTLHHALDAVILASRKGYSDDGLVDMTLKPKYNKGGEFDPEKHLPEPIEFKMDKGSRGSALHDRNPLSYKKGIITRRFMVTEIECGKEDDVISETYREKLKEAFKRFDTKKGKCLTDKEAKEAGFCIKKNELVMSLKCSIKGTGPGQMIRINNNVFKTNVHNVGVDVYLDEKGKKKAYERKNPRLSKHFIEPPPQPNGRVSFTLKRRDMVTVEGEDAIYRIKKLGTSPTIEAVVGSDGKTRTVSATKLTKANSAELEEGADKRTADGSEFESPKKKRKV

SEQ ID NO: 1362 - protein, 972 aa, unidentified; identical to SEQ ID NO: 677

SEQ ID NO: 1363 - protein, 1369 aa, unidentified
MAPKKKRKVGGGGSSTDMKNYRIGVAVGDRSVGLAAIEFDDDGLPIQKLALVTFRHDGGLDPTKNKTPMSRKETRGIARRTMRMNRERKRRLRNLDNVLENLGYSVPEGPEPETYEAWTSRALLASIKLASADELNEHLVRAVRHMARHRGWANPWWSLDQLEKASQEPSETFEIILARARELFGEKVPANPTLGMLGALAANNEVLLRPRDEKKRKTGYVRGTPLMFAQVRQGDQLAELRRICEVQGIEDQYEALRLGVFDHKHPYVPKERVGKDPLNPSTNRTIRASLEFQEFRILDSVANLRVRIGSRAKRELTEAEYDAAVEFLMDYADKEQPSWADVAEKIGVPGNRLVAPVLEDVQQKTAPYDRSSAAFEKAMGKKTEARQWWESTDDDQLRSLLIAFLVDATNDTEEAAAEAGLSELYKSWPAEEREALSNIDFEKGRVAYSQETLSKLSEYMHEYRVGLHEARKAVFGVDDTWRPPLDKLEEPTGQPAVDRVLTILRRFVLDCERQWGRPRAITVEHTRTGLMGPTQRQKILNEQKKNRADNERIRDELRESGVDNPSRAEVRRHLIVQEQECQCLYCGTMITTTTSELDHIVPRAGGGSSRRENLAAVCRACNAKKKRELFYAWAGPVKSQETIERVRQLKAFKDSKKAKMFKNQIRRLNQTEADEPIDERSLASTSYAAVAVRERLEQHFNEGLALDDKSRVVLDVYAGAVTRESRRAGGIDERILLRGERDKNRFDVRHHAVDAAVMTLLNRSVALTLEQRSQLRRAFYEQGLDKLDRDQLKPEEDWRNFIGLGTSGSETPGTSESATPESMTDSQNDTDEYWMGEALKLAQKAWDEGEVPVGAILVRKGEVIGHGWNRSIGSHDPSAHAEIMAIREAGVRIGNYRMLDTVLYVTLEPCAMCAGALVHGRISRLVFGAEDPKTGACGSVMDIARHPALNHQLQVDGGVMAAPCARLLSDFFRWRRAQKKAARDNSSGNSGSETPGTSESATPESGTSLASQEKFLEWKKVTTVLGDLLAEAIEDDSIAVVSPLRLRPQNGRVHKDTIAAVKKQTLGSAWSADAVKRIVDPEIYLAMKDALGKSKVLPEDSARTLELSDGRYLEADDEVLFFPKNAASILTPRGVAEIGGSIHHARLYSWLTKKGELKIGMLRVYGAEFPWLMRESGSHDVLRMPIHPGSQSFRDMQDTTRKAVESSEAVEFAWITQNDELEFEPEDYIAHGGKDELRQFLEFMPECRWRVDGFKKNYQIRIRPAMLSREQLPSDIQRRLESKTLTENESLLLKALDTGLVVAIGGLLPLGTLKVIRRNNLGFPRWRGNGNLPTSFEVRSSALRALGVEGSGGKRPAATKKAGQAKKKK

SEQ ID NO: 1364 - protein, 1369 aa, unidentified; identical to SEQ ID NO: 1157

SEQ ID NO: 1365 - protein, 1369 aa, unidentified
MAPKKKRKVGGGGSSTDMKNYRIGVAVGDRSVGLAAIEFDDDGLPIQKLALVTFRHDGGLDPTKNKTPMSRKETRGIARRTMRMNRERKRRLRNLDNVLENLGYSVPEGPEPETYEAWTSRALLASIKLASADELNEHLVRAVRHMARHRGWANPWWSLDQLEKASQEPSETFEIILARARELFGEKVPANPTLGMLGALAANNEVLLRPRDEKKRKTGYVRGTPLMFAQVRQGDQLAELRRICEVQGIEDQYEALRLGVFDHKHPYVPKERVGKDPLNPSTNRTIRASLEFQEFRILDSVANLRVRIGSRAKRELTEAEYDAAVEFLMDYADKEQPSWADVAEKIGVPGNRLVAPVLEDVQQKTAPYDRSSAAFEKAMGKKTEARQWWESTDDDQLRSLLIAFLVDATNDTEEAAAEAGLSELYKSWPAEEREALSNIDFEKGRVAYSQETLSKLSEYMHEYRVGLHEARKAVFGVDDTWRPPLDKLEEPTGQPAVDRVLTILRRFVLDCERQWGRPRAITVEHTRTGLMGPTQRQKILNEQKKNRADNERIRDELRESGVDNPSRAEVRRHLIVQEQECQCLYCGTMITTTTSELDHIVPRAGGGSSRRENLAAVCRACNAKKKRELFYAWAGPVKSQETIERVRQLKAFKDSKKAKMFKNQIRRLNQTEADEPIDERSLASTSYAAVAVRERLEQHFNEGLALDDKSRVVLDVYAGAVTRESRRAGGIDERILLRGERDKNRFDVRHHAVDAAVMTLLNRSVALTLEQRSQLRRAFYEQGLDKLDRDQLKPEEDWRNFIGLGTSGSETPGTSESATPESMTDSQNGTDGYWMGEALKLAQKAWDEGEVPVGAILVRKGEVIGHGWNRSIGSHDPSAHAEIMAIREAGVRIGNYRMLDTVLYVTLEPCAMCAGALVHGRISRLVFGAENPKTGACGSVMDIARHPALNHQLQVDGGVMAAPCARLLSDFFRWRRAQKKAARDNSSGNSGSETPGTSESATPESGTSLASQEKFLEWKKVTTVLGDLLAEAIEDDSIAVVSPLRLRPQNGRVHKDTIAAVKKQTLGSAWSADAVKRIVDPEIYLAMKDALGKSKVLPEDSARTLELSDGRYLEADDEVLFFPKNAASILTPRGVAEIGGSIHHARLYSWLTKKGELKIGMLRVYGAEFPWLMRESGSHDVLRMPIHPGSQSFRDMQDTTRKAVESSEAVEFAWITQNDELEFEPEDYIAHGGKDELRQFLEFMPECRWRVDGFKKNYQIRIRPAMLSREQLPSDIQRRLESKTLTENESLLLKALDTGLVVAIGGLLPLGTLKVIRRNNLGFPRWRGNGNLPTSFEVRSSALRALGVEGSGGKRPAATKKAGQAKKKK

SEQ ID NO: 1366 - protein, 1369 aa, unidentified
MAPKKKRKVGGGGSSTDMKNYRIGVAVGDRSVGLAAIEFDDDGLPIQKLALVTFRHDGGLDPTKNKTPMSRKETRGIARRTMRMNRERKRRLRNLDNVLENLGYSVPEGPEPETYEAWTSRALLASIKLASADELNEHLVRAVRHMARHRGWANPWWSLDQLEKASQEPSETFEIILARARELFGEKVPANPTLGMLGALAANNEVLLRPRDEKKRKTGYVRGTPLMFAQVRQGDQLAELRRICEVQGIEDQYEALRLGVFDHKHPYVPKERVGKDPLNPSTNRTIRASLEFQEFRILDSVANLRVRIGSRAKRELTEAEYDAAVEFLMDYADKEQPSWADVAEKIGVPGNRLVAPVLEDVQQKTAPYDRSSAAFEKAMGKKTEARQWWESTDDDQLRSLLIAFLVDATNDTEEAAAEAGLSELYKSWPAEEREALSNIDFEKGRVAYSQETLSKLSEYMHEYRVGLHEARKAVFGVDDTWRPPLDKLEEPTGQPAVDRVLTILRRFVLDCERQWGRPRAITVEHTRTGLMGPTQRQKILNEQKKNRADNERIRDELRESGVDNPSRAEVRRHLIVQEQECQCLYCGTMITTTTSELDHIVPRAGGGSSRRENLAAVCRACNAKKKRELFYAWAGPVKSQETIERVRQLKAFKDSKKAKMFKNQIRRLNQTEADEPIDERSLASTSYAAVAVRERLEQHFNEGLALDDKSRVVLDVYAGAVTRESRRAGGIDERILLRGERDKNRFDVRHHAVDAAVMTLLNRSVALTLEQRSQLRRAFYEQGLDKLDRDQLKPEEDWRNFIGLGTSGSETPGTSESATPESMTDSQNDTDEYWMGEALKLAQKAWDEGEVPVGAILVRKGEVIGHGWNRSIGSHDPSAHAEIMAIREAGVRIGNYRMLDTVLYSTLEPCAMCAGALVHGRISRLVFGAENPKTGACGSVMDIARHPALNHQLQVDGGVMAAPCARLLSDFFRWRRAQKKAARDNSSGNSGSETPGTSESATPESGTSLASQEKFLEWKKVTTVLGDLLAEAIEDDSIAVVSPLRLRPQNGRVHKDTIAAVKKQTLGSAWSADAVKRIVDPEIYLAMKDALGKSKVLPEDSARTLELSDGRYLEADDEVLFFPKNAASILTPRGVAEIGGSIHHARLYSWLTKKGELKIGMLRVYGAEFPWLMRESGSHDVLRMPIHPGSQSFRDMQDTTRKAVESSEAVEFAWITQNDELEFEPEDYIAHGGKDELRQFLEFMPECRWRVDGFKKNYQIRIRPAMLSREQLPSDIQRRLESKTLTENESLLLKALDTGLVVAIGGLLPLGTLKVIRRNNLGFPRWRGNGNLPTSFEVRSSALRALGVEGSGGKRPAATKKAGQAKKKK

SEQ ID NO: 1367 - protein, 1369 aa, unidentified
MAPKKKRKVGGGGSSTDMKNYRIGVAVGDRSVGLAAIEFDDDGLPIQKLALVTFRHDGGLDPTKNKTPMSRKETRGIARRTMRMNRERKRRLRNLDNVLENLGYSVPEGPEPETYEAWTSRALLASIKLASADELNEHLVRAVRHMARHRGWANPWWSLDQLEKASQEPSETFEIILARARELFGEKVPANPTLGMLGALAANNEVLLRPRDEKKRKTGYVRGTPLMFAQVRQGDQLAELRRICEVQGIEDQYEALRLGVFDHKHPYVPKERVGKDPLNPSTNRTIRASLEFQEFRILDSVANLRVRIGSRAKRELTEAEYDAAVEFLMDYADKEQPSWADVAEKIGVPGNRLVAPVLEDVQQKTAPYDRSSAAFEKAMGKKTEARQWWESTDDDQLRSLLIAFLVDATNDTEEAAAEAGLSELYKSWPAEEREALSNIDFEKGRVAYSQETLSKLSEYMHEYRVGLHEARKAVFGVDDTWRPPLDKLEEPTGQPAVDRVLTILRRFVLDCERQWGRPRAITVEHTRTGLMGPTQRQKILNEQKKNRADNERIRDELRESGVDNPSRAEVRRHLIVQEQECQCLYCGTMITTTTSELDHIVPRAGGGSSRRENLAAVCRACNAKKKRELFYAWAGPVKSQETIERVRQLKAFKDSKKAKMFKNQIRRLNQTEADEPIDERSLASTSYAAVAVRERLEQHFNEGLALDDKSRVVLDVYAGAVTRESRRAGGIDERILLRGERDKNRFDVRHHAVDAAVMTLLNRSVALTLEQRSQLRRAFYEQGLDKLDRDQLKPEEDWRNFIGLGTSGSETPGTSESATPESMTDSQNDTDEYWMGEALKLAQKAWDEGEVPVGAILVRKGEVIGHGWNRSIGSHDPSAHAEIMAIREAGVRIGNYRMLDTVLYVTFEPCAMCAGALVHGRISRLVFGAENPKTGACGSVMDIARHPALNHQLQVDGGVMAAPCARLLSDFFRWRRAQKKAARDNSSGNSGSETPGTSESATPESGTSLASQEKFLEWKKVTTVLGDLLAEAIEDDSIAVVSPLRLRPQNGRVHKDTIAAVKKQTLGSAWSADAVKRIVDPEIYLAMKDALGKSKVLPEDSARTLELSDGRYLEADDEVLFFPKNAASILTPRGVAEIGGSIHHARLYSWLTKKGELKIGMLRVYGAEFPWLMRESGSHDVLRMPIHPGSQSFRDMQDTTRKAVESSEAVEFAWITQNDELEFEPEDYIAHGGKDELRQFLEFMPECRWRVDGFKKNYQIRIRPAMLSREQLPSDIQRRLESKTLTENESLLLKALDTGLVVAIGGLLPLGTLKVIRRNNLGFPRWRGNGNLPTSFEVRSSALRALGVEGSGGKRPAATKKAGQAKKKK

SEQ ID NO: 1368 - protein, 1369 aa, unidentified
MAPKKKRKVGGGGSSTDMKNYRIGVAVGDRSVGLAAIEFDDDGLPIQKLALVTFRHDGGLDPTKNKTPMSRKETRGIARRTMRMNRERKRRLRNLDNVLENLGYSVPEGPEPETYEAWTSRALLASIKLASADELNEHLVRAVRHMARHRGWANPWWSLDQLEKASQEPSETFEIILARARELFGEKVPANPTLGMLGALAANNEVLLRPRDEKKRKTGYVRGTPLMFAQVRQGDQLAELRRICEVQGIEDQYEALRLGVFDHKHPYVPKERVGKDPLNPSTNRTIRASLEFQEFRILDSVANLRVRIGSRAKRELTEAEYDAAVEFLMDYADKEQPSWADVAEKIGVPGNRLVAPVLEDVQQKTAPYDRSSAAFEKAMGKKTEARQWWESTDDDQLRSLLIAFLVDATNDTEEAAAEAGLSELYKSWPAEEREALSNIDFEKGRVAYSQETLSKLSEYMHEYRVGLHEARKAVFGVDDTWRPPLDKLEEPTGQPAVDRVLTILRRFVLDCERQWGRPRAITVEHTRTGLMGPTQRQKILNEQKKNRADNERIRDELRESGVDNPSRAEVRRHLIVQEQECQCLYCGTMITTTTSELDHIVPRAGGGSSRRENLAAVCRACNAKKKRELFYAWAGPVKSQETIERVRQLKAFKDSKKAKMFKNQIRRLNQTEADEPIDERSLASTSYAAVAVRERLEQHFNEGLALDDKSRVVLDVYAGAVTRESRRAGGIDERILLRGERDKNRFDVRHHAVDAAVMTLLNRSVALTLEQRSQLRRAFYEQGLDKLDRDQLKPEEDWRNFIGLGTSGSETPGTSESATPESMTDSQNDTDEYWMGEALKLAQKAWDEGEVPVGAILVRKGEVIGHGWNRSIGSHDPSAHAEIMAIREAGVRIGNYRMLDTVLYVTLEPCAMCAGALVHGRISRLVFGAENPKRGACGSVMDIARHPALNHQLQVDGGVMAAPCARLLSDFFRWRRAQKKAARDNSSGNSGSETPGTSESATPESGTSLASQEKFLEWKKVTTVLGDLLAEAIEDDSIAVVSPLRLRPQNGRVHKDTIAAVKKQTLGSAWSADAVKRIVDPEIYLAMKDALGKSKVLPEDSARTLELSDGRYLEADDEVLFFPKNAASILTPRGVAEIGGSIHHARLYSWLTKKGELKIGMLRVYGAEFPWLMRESGSHDVLRMPIHPGSQSFRDMQDTTRKAVESSEAVEFAWITQNDELEFEPEDYIAHGGKDELRQFLEFMPECRWRVDGFKKNYQIRIRPAMLSREQLPSDIQRRLESKTLTENESLLLKALDTGLVVAIGGLLPLGTLKVIRRNNLGFPRWRGNGNLPTSFEVRSSALRALGVEGSGGKRPAATKKAGQAKKKK

SEQ ID NO: 1369 - protein, 1369 aa, unidentified
MAPKKKRKVGGGGSSTDMKNYRIGVAVGDRSVGLAAIEFDDDGLPIQKLALVTFRHDGGLDPTKNKTPMSRKETRGIARRTMRMNRERKRRLRNLDNVLENLGYSVPEGPEPETYEAWTSRALLASIKLASADELNEHLVRAVRHMARHRGWANPWWSLDQLEKASQEPSETFEIILARARELFGEKVPANPTLGMLGALAANNEVLLRPRDEKKRKTGYVRGTPLMFAQVRQGDQLAELRRICEVQGIEDQYEALRLGVFDHKHPYVPKERVGKDPLNPSTNRTIRASLEFQEFRILDSVANLRVRIGSRAKRELTEAEYDAAVEFLMDYADKEQPSWADVAEKIGVPGNRLVAPVLEDVQQKTAPYDRSSAAFEKAMGKKTEARQWWESTDDDQLRSLLIAFLVDATNDTEEAAAEAGLSELYKSWPAEEREALSNIDFEKGRVAYSQETLSKLSEYMHEYRVGLHEARKAVFGVDDTWRPPLDKLEEPTGQPAVDRVLTILRRFVLDCERQWGRPRAITVEHTRTGLMGPTQRQKILNEQKKNRADNERIRDELRESGVDNPSRAEVRRHLIVQEQECQCLYCGTMITTTTSELDHIVPRAGGGSSRRENLAAVCRACNAKKKRELFYAWAGPVKSQETIERVRQLKAFKDSKKAKMFKNQIRRLNQTEADEPIDERSLASTSYAAVAVRERLEQHFNEGLALDDKSRVVLDVYAGAVTRESRRAGGIDERILLRGERDKNRFDVRHHAVDAAVMTLLNRSVALTLEQRSQLRRAFYEQGLDKLDRDQLKPEEDWRNFIGLGTSGSETPGTSESATPESMTDSQNDTDEYWMGEALKLAQKAWDEGEVPVGAILVRKGEVIGHGWNRSIGSHDPSAHAEIMAIREAGVRIGNYRMLDTVLYVTLEPCAMCAGALVHGRISRLVFGAENPKTGACGSVMDIARHPALNNQLQVDGGVMAAPCARLLSDFFRWRRAQKKAARDNSSGNSGSETPGTSESATPESGTSLASQEKFLEWKKVTTVLGDLLAEAIEDDSIAVVSPLRLRPQNGRVHKDTIAAVKKQTLGSAWSADAVKRIVDPEIYLAMKDALGKSKVLPEDSARTLELSDGRYLEADDEVLFFPKNAASILTPRGVAEIGGSIHHARLYSWLTKKGELKIGMLRVYGAEFPWLMRESGSHDVLRMPIHPGSQSFRDMQDTTRKAVESSEAVEFAWITQNDELEFEPEDYIAHGGKDELRQFLEFMPECRWRVDGFKKNYQIRIRPAMLSREQLPSDIQRRLESKTLTENESLLLKALDTGLVVAIGGLLPLGTLKVIRRNNLGFPRWRGNGNLPTSFEVRSSALRALGVEGSGGKRPAATKKAGQAKKKK

SEQ ID NO: 1370 - protein, 1369 aa, unidentified
MAPKKKRKVGGGGSSTDMKNYRIGVAVGDRSVGLAAIEFDDDGLPIQKLALVTFRHDGGLDPTKNKTPMSRKETRGIARRTMRMNRERKRRLRNLDNVLENLGYSVPEGPEPETYEAWTSRALLASIKLASADELNEHLVRAVRHMARHRGWANPWWSLDQLEKASQEPSETFEIILARARELFGEKVPANPTLGMLGALAANNEVLLRPRDEKKRKTGYVRGTPLMFAQVRQGDQLAELRRICEVQGIEDQYEALRLGVFDHKHPYVPKERVGKDPLNPSTNRTIRASLEFQEFRILDSVANLRVRIGSRAKRELTEAEYDAAVEFLMDYADKEQPSWADVAEKIGVPGNRLVAPVLEDVQQKTAPYDRSSAAFEKAMGKKTEARQWWESTDDDQLRSLLIAFLVDATNDTEEAAAEAGLSELYKSWPAEEREALSNIDFEKGRVAYSQETLSKLSEYMHEYRVGLHEARKAVFGVDDTWRPPLDKLEEPTGQPAVDRVLTILRRFVLDCERQWGRPRAITVEHTRTGLMGPTQRQKILNEQKKNRADNERIRDELRESGVDNPSRAEVRRHLIVQEQECQCLYCGTMITTTTSELDHIVPRAGGGSSRRENLAAVCRACNAKKKRELFYAWAGPVKSQETIERVRQLKAFKDSKKAKMFKNQIRRLNQTEADEPIDERSLASTSYAAVAVRERLEQHFNEGLALDDKSRVVLDVYAGAVTRESRRAGGIDERILLRGERDKNRFDVRHHAVDAAVMTLLNRSVALTLEQRSQLRRAFYEQGLDKLDRDQLKPEEDWRNFIGLGTSGSETPGTSESATPESMTDSQNDTDEYWMGEALKLAQKAWDEGEVPVGAILVRKGEVIGHGWNRSIGSHDPSAHAEIMAIREAGVRIGNYRMLDTVLYVTLEPCAMCAGALVHGRISRLVFGAENPKTGACGSVMDIARHPALNHQLQVDGGVMAAPCARLLSDFFRWRRRQKKAARDNSSGNSGSETPGTSESATPESGTSLASQEKFLEWKKVTTVLGDLLAEAIEDDSIAVVSPLRLRPQNGRVHKDTIAAVKKQTLGSAWSADAVKRIVDPEIYLAMKDALGKSKVLPEDSARTLELSDGRYLEADDEVLFFPKNAASILTPRGVAEIGGSIHHARLYSWLTKKGELKIGMLRVYGAEFPWLMRESGSHDVLRMPIHPGSQSFRDMQDTTRKAVESSEAVEFAWITQNDELEFEPEDYIAHGGKDELRQFLEFMPECRWRVDGFKKNYQIRIRPAMLSREQLPSDIQRRLESKTLTENESLLLKALDTGLVVAIGGLLPLGTLKVIRRNNLGFPRWRGNGNLPTSFEVRSSALRALGVEGSGGKRPAATKKAGQAKKKK

SEQ ID NO: 1371 - protein, 1369 aa, unidentified
MAPKKKRKVGGGGSSTDMKNYRIGVAVGDRSVGLAAIEFDDDGLPIQKLALVTFRHDGGLDPTKNKTPMSRKETRGIARRTMRMNRERKRRLRNLDNVLENLGYSVPEGPEPETYEAWTSRALLASIKLASADELNEHLVRAVRHMARHRGWANPWWSLDQLEKASQEPSETFEIILARARELFGEKVPANPTLGMLGALAANNEVLLRPRDEKKRKTGYVRGTPLMFAQVRQGDQLAELRRICEVQGIEDQYEALRLGVFDHKHPYVPKERVGKDPLNPSTNRTIRASLEFQEFRILDSVANLRVRIGSRAKRELTEAEYDAAVEFLMDYADKEQPSWADVAEKIGVPGNRLVAPVLEDVQQKTAPYDRSSAAFEKAMGKKTEARQWWESTDDDQLRSLLIAFLVDATNDTEEAAAEAGLSELYKSWPAEEREALSNIDFEKGRVAYSQETLSKLSEYMHEYRVGLHEARKAVFGVDDTWRPPLDKLEEPTGQPAVDRVLTILRRFVLDCERQWGRPRAITVEHTRTGLMGPTQRQKILNEQKKNRADNERIRDELRESGVDNPSRAEVRRHLIVQEQECQCLYCGTMITTTTSELDHIVPRAGGGSSRRENLAAVCRACNAKKKRELFYAWAGPVKSQETIERVRQLKAFKDSKKAKMFKNQIRRLNQTEADEPIDERSLASTSYAAVAVRERLEQHFNEGLALDDKSRVVLDVYAGAVTRESRRAGGIDERILLRGERDKNRFDVRHHAVDAAVMTLLNRSVALTLEQRSQLRRAFYEQGLDKLDRDQLKPEEDWRNFIGLGTSGSETPGTSESATPESMTDSQNGTDGYWMGEALKLAQKAWDEGEVPVGAILVRKGEVIGHGWNRSIGSHDPSAHAEIMAIREAGVRIGNYRMLDTVLYSTLEPCAMCAGALVHGRISRLVFGAENPKTGACGSVMDIARHPALNHQLQVDGGVMAAPCARLLSDFFRWRRAQKKAARDNSSGNSGSETPGTSESATPESGTSLASQEKFLEWKKVTTVLGDLLAEAIEDDSIAVVSPLRLRPQNGRVHKDTIAAVKKQTLGSAWSADAVKRIVDPEIYLAMKDALGKSKVLPEDSARTLELSDGRYLEADDEVLFFPKNAASILTPRGVAEIGGSIHHARLYSWLTKKGELKIGMLRVYGAEFPWLMRESGSHDVLRMPIHPGSQSFRDMQDTTRKAVESSEAVEFAWITQNDELEFEPEDYIAHGGKDELRQFLEFMPECRWRVDGFKKNYQIRIRPAMLSREQLPSDIQRRLESKTLTENESLLLKALDTGLVVAIGGLLPLGTLKVIRRNNLGFPRWRGNGNLPTSFEVRSSALRALGVEGSGGKRPAATKKAGQAKKKK

SEQ ID NO: 1372 - protein, 1369 aa, unidentified
MAPKKKRKVGGGGSSTDMKNYRIGVAVGDRSVGLAAIEFDDDGLPIQKLALVTFRHDGGLDPTKNKTPMSRKETRGIARRTMRMNRERKRRLRNLDNVLENLGYSVPEGPEPETYEAWTSRALLASIKLASADELNEHLVRAVRHMARHRGWANPWWSLDQLEKASQEPSETFEIILARARELFGEKVPANPTLGMLGALAANNEVLLRPRDEKKRKTGYVRGTPLMFAQVRQGDQLAELRRICEVQGIEDQYEALRLGVFDHKHPYVPKERVGKDPLNPSTNRTIRASLEFQEFRILDSVANLRVRIGSRAKRELTEAEYDAAVEFLMDYADKEQPSWADVAEKIGVPGNRLVAPVLEDVQQKTAPYDRSSAAFEKAMGKKTEARQWWESTDDDQLRSLLIAFLVDATNDTEEAAAEAGLSELYKSWPAEEREALSNIDFEKGRVAYSQETLSKLSEYMHEYRVGLHEARKAVFGVDDTWRPPLDKLEEPTGQPAVDRVLTILRRFVLDCERQWGRPRAITVEHTRTGLMGPTQRQKILNEQKKNRADNERIRDELRESGVDNPSRAEVRRHLIVQEQECQCLYCGTMITTTTSELDHIVPRAGGGSSRRENLAAVCRACNAKKKRELFYAWAGPVKSQETIERVRQLKAFKDSKKAKMFKNQIRRLNQTEADEPIDERSLASTSYAAVAVRERLEQHFNEGLALDDKSRVVLDVYAGAVTRESRRAGGIDERILLRGERDKNRFDVRHHAVDAAVMTLLNRSVALTLEQRSQLRRAFYEQGLDKLDRDQLKPEEDWRNFIGLGTSGSETPGTSESATPESMTDSQNGTDGYWMGEALKLAQKAWDEGEVPVGAILVRKGEVIGHGWNRSIGSHDPSAHAEIMAIREAGVRIGNYRMLDTVLYVTFEPCAMCAGALVHGRISRLVFGAENPKTGACGSVMDIARHPALNHQLQVDGGVMAAPCARLLSDFFRWRRAQKKAARDNSSGNSGSETPGTSESATPESGTSLASQEKFLEWKKVTTVLGDLLAEAIEDDSIAVVSPLRLRPQNGRVHKDTIAAVKKQTLGSAWSADAVKRIVDPEIYLAMKDALGKSKVLPEDSARTLELSDGRYLEADDEVLFFPKNAASILTPRGVAEIGGSIHHARLYSWLTKKGELKIGMLRVYGAEFPWLMRESGSHDVLRMPIHPGSQSFRDMQDTTRKAVESSEAVEFAWITQNDELEFEPEDYIAHGGKDELRQFLEFMPECRWRVDGFKKNYQIRIRPAMLSREQLPSDIQRRLESKTLTENESLLLKALDTGLVVAIGGLLPLGTLKVIRRNNLGFPRWRGNGNLPTSFEVRSSALRALGVEGSGGKRPAATKKAGQAKKKK

SEQ ID NO: 1373 - protein, 1369 aa, unidentified
MAPKKKRKVGGGGSSTDMKNYRIGVAVGDRSVGLAAIEFDDDGLPIQKLALVTFRHDGGLDPTKNKTPMSRKETRGIARRTMRMNRERKRRLRNLDNVLENLGYSVPEGPEPETYEAWTSRALLASIKLASADELNEHLVRAVRHMARHRGWANPWWSLDQLEKASQEPSETFEIILARARELFGEKVPANPTLGMLGALAANNEVLLRPRDEKKRKTGYVRGTPLMFAQVRQGDQLAELRRICEVQGIEDQYEALRLGVFDHKHPYVPKERVGKDPLNPSTNRTIRASLEFQEFRILDSVANLRVRIGSRAKRELTEAEYDAAVEFLMDYADKEQPSWADVAEKIGVPGNRLVAPVLEDVQQKTAPYDRSSAAFEKAMGKKTEARQWWESTDDDQLRSLLIAFLVDATNDTEEAAAEAGLSELYKSWPAEEREALSNIDFEKGRVAYSQETLSKLSEYMHEYRVGLHEARKAVFGVDDTWRPPLDKLEEPTGQPAVDRVLTILRRFVLDCERQWGRPRAITVEHTRTGLMGPTQRQKILNEQKKNRADNERIRDELRESGVDNPSRAEVRRHLIVQEQECQCLYCGTMITTTTSELDHIVPRAGGGSSRRENLAAVCRACNAKKKRELFYAWAGPVKSQETIERVRQLKAFKDSKKAKMFKNQIRRLNQTEADEPIDERSLASTSYAAVAVRERLEQHFNEGLALDDKSRVVLDVYAGAVTRESRRAGGIDERILLRGERDKNRFDVRHHAVDAAVMTLLNRSVALTLEQRSQLRRAFYEQGLDKLDRDQLKPEEDWRNFIGLGTSGSETPGTSESATPESMTDSQNGTDGYWMGEALKLAQKAWDEGEVPVGAILVRKGEVIGHGWNRSIGSHDPSAHAEIMAIREAGVRIGNYRMLDTVLYVTLEPCAMCAGALVHGRISRLVFGAENPKRGACGSVMDIARHPALNHQLQVDGGVMAAPCARLLSDFFRWRRAQKKAARDNSSGNSGSETPGTSESATPESGTSLASQEKFLEWKKVTTVLGDLLAEAIEDDSIAVVSPLRLRPQNGRVHKDTIAAVKKQTLGSAWSADAVKRIVDPEIYLAMKDALGKSKVLPEDSARTLELSDGRYLEADDEVLFFPKNAASILTPRGVAEIGGSIHHARLYSWLTKKGELKIGMLRVYGAEFPWLMRESGSHDVLRMPIHPGSQSFRDMQDTTRKAVESSEAVEFAWITQNDELEFEPEDYIAHGGKDELRQFLEFMPECRWRVDGFKKNYQIRIRPAMLSREQLPSDIQRRLESKTLTENESLLLKALDTGLVVAIGGLLPLGTLKVIRRNNLGFPRWRGNGNLPTSFEVRSSALRALGVEGSGGKRPAATKKAGQAKKKK

SEQ ID NO: 1374 - protein, 1369 aa, unidentified
MAPKKKRKVGGGGSSTDMKNYRIGVAVGDRSVGLAAIEFDDDGLPIQKLALVTFRHDGGLDPTKNKTPMSRKETRGIARRTMRMNRERKRRLRNLDNVLENLGYSVPEGPEPETYEAWTSRALLASIKLASADELNEHLVRAVRHMARHRGWANPWWSLDQLEKASQEPSETFEIILARARELFGEKVPANPTLGMLGALAANNEVLLRPRDEKKRKTGYVRGTPLMFAQVRQGDQLAELRRICEVQGIEDQYEALRLGVFDHKHPYVPKERVGKDPLNPSTNRTIRASLEFQEFRILDSVANLRVRIGSRAKRELTEAEYDAAVEFLMDYADKEQPSWADVAEKIGVPGNRLVAPVLEDVQQKTAPYDRSSAAFEKAMGKKTEARQWWESTDDDQLRSLLIAFLVDATNDTEEAAAEAGLSELYKSWPAEEREALSNIDFEKGRVAYSQETLSKLSEYMHEYRVGLHEARKAVFGVDDTWRPPLDKLEEPTGQPAVDRVLTILRRFVLDCERQWGRPRAITVEHTRTGLMGPTQRQKILNEQKKNRADNERIRDELRESGVDNPSRAEVRRHLIVQEQECQCLYCGTMITTTTSELDHIVPRAGGGSSRRENLAAVCRACNAKKKRELFYAWAGPVKSQETIERVRQLKAFKDSKKAKMFKNQIRRLNQTEADEPIDERSLASTSYAAVAVRERLEQHFNEGLALDDKSRVVLDVYAGAVTRESRRAGGIDERILLRGERDKNRFDVRHHAVDAAVMTLLNRSVALTLEQRSQLRRAFYEQGLDKLDRDQLKPEEDWRNFIGLGTSGSETPGTSESATPESMTDSQNGTDGYWMGEALKLAQKAWDEGEVPVGAILVRKGEVIGHGWNRSIGSHDPSAHAEIMAIREAGVRIGNYRMLDTVLYVTLEPCAMCAGALVHGRISRLVFGAENPKTGACGSVMDIARHPALNNQLQVDGGVMAAPCARLLSDFFRWRRAQKKAARDNSSGNSGSETPGTSESATPESGTSLASQEKFLEWKKVTTVLGDLLAEAIEDDSIAVVSPLRLRPQNGRVHKDTIAAVKKQTLGSAWSADAVKRIVDPEIYLAMKDALGKSKVLPEDSARTLELSDGRYLEADDEVLFFPKNAASILTPRGVAEIGGSIHHARLYSWLTKKGELKIGMLRVYGAEFPWLMRESGSHDVLRMPIHPGSQSFRDMQDTTRKAVESSEAVEFAWITQNDELEFEPEDYIAHGGKDELRQFLEFMPECRWRVDGFKKNYQIRIRPAMLSREQLPSDIQRRLESKTLTENESLLLKALDTGLVVAIGGLLPLGTLKVIRRNNLGFPRWRGNGNLPTSFEVRSSALRALGVEGSGGKRPAATKKAGQAKKKK

SEQ ID NO: 1375 - protein, 1369 aa, unidentified
MAPKKKRKVGGGGSSTDMKNYRIGVAVGDRSVGLAAIEFDDDGLPIQKLALVTFRHDGGLDPTKNKTPMSRKETRGIARRTMRMNRERKRRLRNLDNVLENLGYSVPEGPEPETYEAWTSRALLASIKLASADELNEHLVRAVRHMARHRGWANPWWSLDQLEKASQEPSETFEIILARARELFGEKVPANPTLGMLGALAANNEVLLRPRDEKKRKTGYVRGTPLMFAQVRQGDQLAELRRICEVQGIEDQYEALRLGVFDHKHPYVPKERVGKDPLNPSTNRTIRASLEFQEFRILDSVANLRVRIGSRAKRELTEAEYDAAVEFLMDYADKEQPSWADVAEKIGVPGNRLVAPVLEDVQQKTAPYDRSSAAFEKAMGKKTEARQWWESTDDDQLRSLLIAFLVDATNDTEEAAAEAGLSELYKSWPAEEREALSNIDFEKGRVAYSQETLSKLSEYMHEYRVGLHEARKAVFGVDDTWRPPLDKLEEPTGQPAVDRVLTILRRFVLDCERQWGRPRAITVEHTRTGLMGPTQRQKILNEQKKNRADNERIRDELRESGVDNPSRAEVRRHLIVQEQECQCLYCGTMITTTTSELDHIVPRAGGGSSRRENLAAVCRACNAKKKRELFYAWAGPVKSQETIERVRQLKAFKDSKKAKMFKNQIRRLNQTEADEPIDERSLASTSYAAVAVRERLEQHFNEGLALDDKSRVVLDVYAGAVTRESRRAGGIDERILLRGERDKNRFDVRHHAVDAAVMTLLNRSVALTLEQRSQLRRAFYEQGLDKLDRDQLKPEEDWRNFIGLGTSGSETPGTSESATPESMTDSQNGTDGYWMGEALKLAQKAWDEGEVPVGAILVRKGEVIGHGWNRSIGSHDPSAHAEIMAIREAGVRIGNYRMLDTVLYVTLEPCAMCAGALVHGRISRLVFGAENPKTGACGSVMDIARHPALNHQLQVDGGVMAAPCARLLSRFFRWRRAQKKAARDNSSGNSGSETPGTSESATPESGTSLASQEKFLEWKKVTTVLGDLLAEAIEDDSIAVVSPLRLRPQNGRVHKDTIAAVKKQTLGSAWSADAVKRIVDPEIYLAMKDALGKSKVLPEDSARTLELSDGRYLEADDEVLFFPKNAASILTPRGVAEIGGSIHHARLYSWLTKKGELKIGMLRVYGAEFPWLMRESGSHDVLRMPIHPGSQSFRDMQDTTRKAVESSEAVEFAWITQNDELEFEPEDYIAHGGKDELRQFLEFMPECRWRVDGFKKNYQIRIRPAMLSREQLPSDIQRRLESKTLTENESLLLKALDTGLVVAIGGLLPLGTLKVIRRNNLGFPRWRGNGNLPTSFEVRSSALRALGVEGSGGKRPAATKKAGQAKKKK

SEQ ID NO: 1376 - protein, 1369 aa, unidentified
MAPKKKRKVGGGGSSTDMKNYRIGVAVGDRSVGLAAIEFDDDGLPIQKLALVTFRHDGGLDPTKNKTPMSRKETRGIARRTMRMNRERKRRLRNLDNVLENLGYSVPEGPEPETYEAWTSRALLASIKLASADELNEHLVRAVRHMARHRGWANPWWSLDQLEKASQEPSETFEIILARARELFGEKVPANPTLGMLGALAANNEVLLRPRDEKKRKTGYVRGTPLMFAQVRQGDQLAELRRICEVQGIEDQYEALRLGVFDHKHPYVPKERVGKDPLNPSTNRTIRASLEFQEFRILDSVANLRVRIGSRAKRELTEAEYDAAVEFLMDYADKEQPSWADVAEKIGVPGNRLVAPVLEDVQQKTAPYDRSSAAFEKAMGKKTEARQWWESTDDDQLRSLLIAFLVDATNDTEEAAAEAGLSELYKSWPAEEREALSNIDFEKGRVAYSQETLSKLSEYMHEYRVGLHEARKAVFGVDDTWRPPLDKLEEPTGQPAVDRVLTILRRFVLDCERQWGRPRAITVEHTRTGLMGPTQRQKILNEQKKNRADNERIRDELRESGVDNPSRAEVRRHLIVQEQECQCLYCGTMITTTTSELDHIVPRAGGGSSRRENLAAVCRACNAKKKRELFYAWAGPVKSQETIERVRQLKAFKDSKKAKMFKNQIRRLNQTEADEPIDERSLASTSYAAVAVRERLEQHFNEGLALDDKSRVVLDVYAGAVTRESRRAGGIDERILLRGERDKNRFDVRHHAVDAAVMTLLNRSVALTLEQRSQLRRAFYEQGLDKLDRDQLKPEEDWRNFIGLGTSGSETPGTSESATPESMTDSQNGTDGYWMGEALKLAQKAWDEGEVPVGAILVRKGEVIGHGWNRSIGSHDPSAHAEIMAIREAGVRIGNYRMLDTVLYVTLEPCAMCAGALVHGRISRLVFGAENPKTGACGSVMDIARHPALNHQLQVDGGVMAAPCARLLSDFFRWRRRQKKAARDNSSGNSGSETPGTSESATPESGTSLASQEKFLEWKKVTTVLGDLLAEAIEDDSIAVVSPLRLRPQNGRVHKDTIAAVKKQTLGSAWSADAVKRIVDPEIYLAMKDALGKSKVLPEDSARTLELSDGRYLEADDEVLFFPKNAASILTPRGVAEIGGSIHHARLYSWLTKKGELKIGMLRVYGAEFPWLMRESGSHDVLRMPIHPGSQSFRDMQDTTRKAVESSEAVEFAWITQNDELEFEPEDYIAHGGKDELRQFLEFMPECRWRVDGFKKNYQIRIRPAMLSREQLPSDIQRRLESKTLTENESLLLKALDTGLVVAIGGLLPLGTLKVIRRNNLGFPRWRGNGNLPTSFEVRSSALRALGVEGSGGKRPAATKKAGQAKKKK

SEQ ID NO: 1377 - protein, 1369 aa, unidentified
MAPKKKRKVGGGGSSTDMKNYRIGVAVGDRSVGLAAIEFDDDGLPIQKLALVTFRHDGGLDPTKNKTPMSRKETRGIARRTMRMNRERKRRLRNLDNVLENLGYSVPEGPEPETYEAWTSRALLASIKLASADELNEHLVRAVRHMARHRGWANPWWSLDQLEKASQEPSETFEIILARARELFGEKVPANPTLGMLGALAANNEVLLRPRDEKKRKTGYVRGTPLMFAQVRQGDQLAELRRICEVQGIEDQYEALRLGVFDHKHPYVPKERVGKDPLNPSTNRTIRASLEFQEFRILDSVANLRVRIGSRAKRELTEAEYDAAVEFLMDYADKEQPSWADVAEKIGVPGNRLVAPVLEDVQQKTAPYDRSSAAFEKAMGKKTEARQWWESTDDDQLRSLLIAFLVDATNDTEEAAAEAGLSELYKSWPAEEREALSNIDFEKGRVAYSQETLSKLSEYMHEYRVGLHEARKAVFGVDDTWRPPLDKLEEPTGQPAVDRVLTILRRFVLDCERQWGRPRAITVEHTRTGLMGPTQRQKILNEQKKNRADNERIRDELRESGVDNPSRAEVRRHLIVQEQECQCLYCGTMITTTTSELDHIVPRAGGGSSRRENLAAVCRACNAKKKRELFYAWAGPVKSQETIERVRQLKAFKDSKKAKMFKNQIRRLNQTEADEPIDERSLASTSYAAVAVRERLEQHFNEGLALDDKSRVVLDVYAGAVTRESRRAGGIDERILLRGERDKNRFDVRHHAVDAAVMTLLNRSVALTLEQRSQLRRAFYEQGLDKLDRDQLKPEEDWRNFIGLGTSGSETPGTSESATPESMTDSQNDTDEYWMGEALKLAQKAWDEGEVPVGAILVRKGEVIGHGWNRSIGSHDPSAHAEIMAIREAGVRIGNYRMLDTVLYSTFEPCAMCAGALVHGRISRLVFGAENPKTGACGSVMDIARHPALNHQLQVDGGVMAAPCARLLSDFFRWRRAQKKAARDNSSGNSGSETPGTSESATPESGTSLASQEKFLEWKKVTTVLGDLLAEAIEDDSIAVVSPLRLRPQNGRVHKDTIAAVKKQTLGSAWSADAVKRIVDPEIYLAMKDALGKSKVLPEDSARTLELSDGRYLEADDEVLFFPKNAASILTPRGVAEIGGSIHHARLYSWLTKKGELKIGMLRVYGAEFPWLMRESGSHDVLRMPIHPGSQSFRDMQDTTRKAVESSEAVEFAWITQNDELEFEPEDYIAHGGKDELRQFLEFMPECRWRVDGFKKNYQIRIRPAMLSREQLPSDIQRRLESKTLTENESLLLKALDTGLVVAIGGLLPLGTLKVIRRNNLGFPRWRGNGNLPTSFEVRSSALRALGVEGSGGKRPAATKKAGQAKKKK

SEQ ID NO: 1378 - protein, 1369 aa, unidentified
MAPKKKRKVGGGGSSTDMKNYRIGVAVGDRSVGLAAIEFDDDGLPIQKLALVTFRHDGGLDPTKNKTPMSRKETRGIARRTMRMNRERKRRLRNLDNVLENLGYSVPEGPEPETYEAWTSRALLASIKLASADELNEHLVRAVRHMARHRGWANPWWSLDQLEKASQEPSETFEIILARARELFGEKVPANPTLGMLGALAANNEVLLRPRDEKKRKTGYVRGTPLMFAQVRQGDQLAELRRICEVQGIEDQYEALRLGVFDHKHPYVPKERVGKDPLNPSTNRTIRASLEFQEFRILDSVANLRVRIGSRAKRELTEAEYDAAVEFLMDYADKEQPSWADVAEKIGVPGNRLVAPVLEDVQQKTAPYDRSSAAFEKAMGKKTEARQWWESTDDDQLRSLLIAFLVDATNDTEEAAAEAGLSELYKSWPAEEREALSNIDFEKGRVAYSQETLSKLSEYMHEYRVGLHEARKAVFGVDDTWRPPLDKLEEPTGQPAVDRVLTILRRFVLDCERQWGRPRAITVEHTRTGLMGPTQRQKILNEQKKNRADNERIRDELRESGVDNPSRAEVRRHLIVQEQECQCLYCGTMITTTTSELDHIVPRAGGGSSRRENLAAVCRACNAKKKRELFYAWAGPVKSQETIERVRQLKAFKDSKKAKMFKNQIRRLNQTEADEPIDERSLASTSYAAVAVRERLEQHFNEGLALDDKSRVVLDVYAGAVTRESRRAGGIDERILLRGERDKNRFDVRHHAVDAAVMTLLNRSVALTLEQRSQLRRAFYEQGLDKLDRDQLKPEEDWRNFIGLGTSGSETPGTSESATPESMTDSQNDTDEYWMGEALKLAQKAWDEGEVPVGAILVRKGEVIGHGWNRSIGSHDPSAHAEIMAIREAGVRIGNYRMLDTVLYSTLEPCAMCAGALVHGRISRLVFGAENPKRGACGSVMDIARHPALNHQLQVDGGVMAAPCARLLSDFFRWRRAQKKAARDNSSGNSGSETPGTSESATPESGTSLASQEKFLEWKKVTTVLGDLLAEAIEDDSIAVVSPLRLRPQNGRVHKDTIAAVKKQTLGSAWSADAVKRIVDPEIYLAMKDALGKSKVLPEDSARTLELSDGRYLEADDEVLFFPKNAASILTPRGVAEIGGSIHHARLYSWLTKKGELKIGMLRVYGAEFPWLMRESGSHDVLRMPIHPGSQSFRDMQDTTRKAVESSEAVEFAWITQNDELEFEPEDYIAHGGKDELRQFLEFMPECRWRVDGFKKNYQIRIRPAMLSREQLPSDIQRRLESKTLTENESLLLKALDTGLVVAIGGLLPLGTLKVIRRNNLGFPRWRGNGNLPTSFEVRSSALRALGVEGSGGKRPAATKKAGQAKKKK

SEQ ID NO: 1379 - protein, 1369 aa, unidentified
MAPKKKRKVGGGGSSTDMKNYRIGVAVGDRSVGLAAIEFDDDGLPIQKLALVTFRHDGGLDPTKNKTPMSRKETRGIARRTMRMNRERKRRLRNLDNVLENLGYSVPEGPEPETYEAWTSRALLASIKLASADELNEHLVRAVRHMARHRGWANPWWSLDQLEKASQEPSETFEIILARARELFGEKVPANPTLGMLGALAANNEVLLRPRDEKKRKTGYVRGTPLMFAQVRQGDQLAELRRICEVQGIEDQYEALRLGVFDHKHPYVPKERVGKDPLNPSTNRTIRASLEFQEFRILDSVANLRVRIGSRAKRELTEAEYDAAVEFLMDYADKEQPSWADVAEKIGVPGNRLVAPVLEDVQQKTAPYDRSSAAFEKAMGKKTEARQWWESTDDDQLRSLLIAFLVDATNDTEEAAAEAGLSELYKSWPAEEREALSNIDFEKGRVAYSQETLSKLSEYMHEYRVGLHEARKAVFGVDDTWRPPLDKLEEPTGQPAVDRVLTILRRFVLDCERQWGRPRAITVEHTRTGLMGPTQRQKILNEQKKNRADNERIRDELRESGVDNPSRAEVRRHLIVQEQECQCLYCGTMITTTTSELDHIVPRAGGGSSRRENLAAVCRACNAKKKRELFYAWAGPVKSQETIERVRQLKAFKDSKKAKMFKNQIRRLNQTEADEPIDERSLASTSYAAVAVRERLEQHFNEGLALDDKSRVVLDVYAGAVTRESRRAGGIDERILLRGERDKNRFDVRHHAVDAAVMTLLNRSVALTLEQRSQLRRAFYEQGLDKLDRDQLKPEEDWRNFIGLGTSGSETPGTSESATPESMTDSQNDTDEYWMGEALKLAQKAWDEGEVPVGAILVRKGEVIGHGWNRSIGSHDPSAHAEIMAIREAGVRIGNYRMLDTVLYSTLEPCAMCAGALVHGRISRLVFGAENPKTGACGSVMDIARHPALNNQLQVDGGVMAAPCARLLSDFFRWRRAQKKAARDNSSGNSGSETPGTSESATPESGTSLASQEKFLEWKKVTTVLGDLLAEAIEDDSIAVVSPLRLRPQNGRVHKDTIAAVKKQTLGSAWSADAVKRIVDPEIYLAMKDALGKSKVLPEDSARTLELSDGRYLEADDEVLFFPKNAASILTPRGVAEIGGSIHHARLYSWLTKKGELKIGMLRVYGAEFPWLMRESGSHDVLRMPIHPGSQSFRDMQDTTRKAVESSEAVEFAWITQNDELEFEPEDYIAHGGKDELRQFLEFMPECRWRVDGFKKNYQIRIRPAMLSREQLPSDIQRRLESKTLTENESLLLKALDTGLVVAIGGLLPLGTLKVIRRNNLGFPRWRGNGNLPTSFEVRSSALRALGVEGSGGKRPAATKKAGQAKKKK

SEQ ID NO: 1380 - protein, 1369 aa, unidentified
MAPKKKRKVGGGGSSTDMKNYRIGVAVGDRSVGLAAIEFDDDGLPIQKLALVTFRHDGGLDPTKNKTPMSRKETRGIARRTMRMNRERKRRLRNLDNVLENLGYSVPEGPEPETYEAWTSRALLASIKLASADELNEHLVRAVRHMARHRGWANPWWSLDQLEKASQEPSETFEIILARARELFGEKVPANPTLGMLGALAANNEVLLRPRDEKKRKTGYVRGTPLMFAQVRQGDQLAELRRICEVQGIEDQYEALRLGVFDHKHPYVPKERVGKDPLNPSTNRTIRASLEFQEFRILDSVANLRVRIGSRAKRELTEAEYDAAVEFLMDYADKEQPSWADVAEKIGVPGNRLVAPVLEDVQQKTAPYDRSSAAFEKAMGKKTEARQWWESTDDDQLRSLLIAFLVDATNDTEEAAAEAGLSELYKSWPAEEREALSNIDFEKGRVAYSQETLSKLSEYMHEYRVGLHEARKAVFGVDDTWRPPLDKLEEPTGQPAVDRVLTILRRFVLDCERQWGRPRAITVEHTRTGLMGPTQRQKILNEQKKNRADNERIRDELRESGVDNPSRAEVRRHLIVQEQECQCLYCGTMITTTTSELDHIVPRAGGGSSRRENLAAVCRACNAKKKRELFYAWAGPVKSQETIERVRQLKAFKDSKKAKMFKNQIRRLNQTEADEPIDERSLASTSYAAVAVRERLEQHFNEGLALDDKSRVVLDVYAGAVTRESRRAGGIDERILLRGERDKNRFDVRHHAVDAAVMTLLNRSVALTLEQRSQLRRAFYEQGLDKLDRDQLKPEEDWRNFIGLGTSGSETPGTSESATPESMTDSQNDTDEYWMGEALKLAQKAWDEGEVPVGAILVRKGEVIGHGWNRSIGSHDPSAHAEIMAIREAGVRIGNYRMLDTVLYSTLEPCAMCAGALVHGRISRLVFGAENPKTGACGSVMDIARHPALNHQLQVDGGVMAAPCARLLSDFFRWRRRQKKAARDNSSGNSGSETPGTSESATPESGTSLASQEKFLEWKKVTTVLGDLLAEAIEDDSIAVVSPLRLRPQNGRVHKDTIAAVKKQTLGSAWSADAVKRIVDPEIYLAMKDALGKSKVLPEDSARTLELSDGRYLEADDEVLFFPKNAASILTPRGVAEIGGSIHHARLYSWLTKKGELKIGMLRVYGAEFPWLMRESGSHDVLRMPIHPGSQSFRDMQDTTRKAVESSEAVEFAWITQNDELEFEPEDYIAHGGKDELRQFLEFMPECRWRVDGFKKNYQIRIRPAMLSREQLPSDIQRRLESKTLTENESLLLKALDTGLVVAIGGLLPLGTLKVIRRNNLGFPRWRGNGNLPTSFEVRSSALRALGVEGSGGKRPAATKKAGQAKKKK

SEQ ID NO: 1381 - protein, 1369 aa, unidentified
MAPKKKRKVGGGGSSTDMKNYRIGVAVGDRSVGLAAIEFDDDGLPIQKLALVTFRHDGGLDPTKNKTPMSRKETRGIARRTMRMNRERKRRLRNLDNVLENLGYSVPEGPEPETYEAWTSRALLASIKLASADELNEHLVRAVRHMARHRGWANPWWSLDQLEKASQEPSETFEIILARARELFGEKVPANPTLGMLGALAANNEVLLRPRDEKKRKTGYVRGTPLMFAQVRQGDQLAELRRICEVQGIEDQYEALRLGVFDHKHPYVPKERVGKDPLNPSTNRTIRASLEFQEFRILDSVANLRVRIGSRAKRELTEAEYDAAVEFLMDYADKEQPSWADVAEKIGVPGNRLVAPVLEDVQQKTAPYDRSSAAFEKAMGKKTEARQWWESTDDDQLRSLLIAFLVDATNDTEEAAAEAGLSELYKSWPAEEREALSNIDFEKGRVAYSQETLSKLSEYMHEYRVGLHEARKAVFGVDDTWRPPLDKLEEPTGQPAVDRVLTILRRFVLDCERQWGRPRAITVEHTRTGLMGPTQRQKILNEQKKNRADNERIRDELRESGVDNPSRAEVRRHLIVQEQECQCLYCGTMITTTTSELDHIVPRAGGGSSRRENLAAVCRACNAKKKRELFYAWAGPVKSQETIERVRQLKAFKDSKKAKMFKNQIRRLNQTEADEPIDERSLASTSYAAVAVRERLEQHFNEGLALDDKSRVVLDVYAGAVTRESRRAGGIDERILLRGERDKNRFDVRHHAVDAAVMTLLNRSVALTLEQRSQLRRAFYEQGLDKLDRDQLKPEEDWRNFIGLGTSGSETPGTSESATPESMTDSQNDTDEYWMGEALKLAQKAWDEGEVPVGAILVRKGEVIGHGWNRSIGSHDPSAHAEIMAIREAGVRIGNYRMLDTVLYVTFEPCAMCAGALVHGRISRLVFGAENPKRGACGSVMDIARHPALNHQLQVDGGVMAAPCARLLSDFFRWRRAQKKAARDNSSGNSGSETPGTSESATPESGTSLASQEKFLEWKKVTTVLGDLLAEAIEDDSIAVVSPLRLRPQNGRVHKDTIAAVKKQTLGSAWSADAVKRIVDPEIYLAMKDALGKSKVLPEDSARTLELSDGRYLEADDEVLFFPKNAASILTPRGVAEIGGSIHHARLYSWLTKKGELKIGMLRVYGAEFPWLMRESGSHDVLRMPIHPGSQSFRDMQDTTRKAVESSEAVEFAWITQNDELEFEPEDYIAHGGKDELRQFLEFMPECRWRVDGFKKNYQIRIRPAMLSREQLPSDIQRRLESKTLTENESLLLKALDTGLVVAIGGLLPLGTLKVIRRNNLGFPRWRGNGNLPTSFEVRSSALRALGVEGSGGKRPAATKKAGQAKKKK

SEQ ID NO: 1382 - protein, 1369 aa, unidentified
MAPKKKRKVGGGGSSTDMKNYRIGVAVGDRSVGLAAIEFDDDGLPIQKLALVTFRHDGGLDPTKNKTPMSRKETRGIARRTMRMNRERKRRLRNLDNVLENLGYSVPEGPEPETYEAWTSRALLASIKLASADELNEHLVRAVRHMARHRGWANPWWSLDQLEKASQEPSETFEIILARARELFGEKVPANPTLGMLGALAANNEVLLRPRDEKKRKTGYVRGTPLMFAQVRQGDQLAELRRICEVQGIEDQYEALRLGVFDHKHPYVPKERVGKDPLNPSTNRTIRASLEFQEFRILDSVANLRVRIGSRAKRELTEAEYDAAVEFLMDYADKEQPSWADVAEKIGVPGNRLVAPVLEDVQQKTAPYDRSSAAFEKAMGKKTEARQWWESTDDDQLRSLLIAFLVDATNDTEEAAAEAGLSELYKSWPAEEREALSNIDFEKGRVAYSQETLSKLSEYMHEYRVGLHEARKAVFGVDDTWRPPLDKLEEPTGQPAVDRVLTILRRFVLDCERQWGRPRAITVEHTRTGLMGPTQRQKILNEQKKNRADNERIRDELRESGVDNPSRAEVRRHLIVQEQECQCLYCGTMITTTTSELDHIVPRAGGGSSRRENLAAVCRACNAKKKRELFYAWAGPVKSQETIERVRQLKAFKDSKKAKMFKNQIRRLNQTEADEPIDERSLASTSYAAVAVRERLEQHFNEGLALDDKSRVVLDVYAGAVTRESRRAGGIDERILLRGERDKNRFDVRHHAVDAAVMTLLNRSVALTLEQRSQLRRAFYEQGLDKLDRDQLKPEEDWRNFIGLGTSGSETPGTSESATPESMTDSQNDTDEYWMGEALKLAQKAWDEGEVPVGAILVRKGEVIGHGWNRSIGSHDPSAHAEIMAIREAGVRIGNYRMLDTVLYVTFEPCAMCAGALVHGRISRLVFGAENPKTGACGSVMDIARHPALNNQLQVDGGVMAAPCARLLSDFFRWRRAQKKAARDNSSGNSGSETPGTSESATPESGTSLASQEKFLEWKKVTTVLGDLLAEAIEDDSIAVVSPLRLRPQNGRVHKDTIAAVKKQTLGSAWSADAVKRIVDPEIYLAMKDALGKSKVLPEDSARTLELSDGRYLEADDEVLFFPKNAASILTPRGVAEIGGSIHHARLYSWLTKKGELKIGMLRVYGAEFPWLMRESGSHDVLRMPIHPGSQSFRDMQDTTRKAVESSEAVEFAWITQNDELEFEPEDYIAHGGKDELRQFLEFMPECRWRVDGFKKNYQIRIRPAMLSREQLPSDIQRRLESKTLTENESLLLKALDTGLVVAIGGLLPLGTLKVIRRNNLGFPRWRGNGNLPTSFEVRSSALRALGVEGSGGKRPAATKKAGQAKKKK

SEQ ID NO: 1383 - protein, 1369 aa, unidentified
MAPKKKRKVGGGGSSTDMKNYRIGVAVGDRSVGLAAIEFDDDGLPIQKLALVTFRHDGGLDPTKNKTPMSRKETRGIARRTMRMNRERKRRLRNLDNVLENLGYSVPEGPEPETYEAWTSRALLASIKLASADELNEHLVRAVRHMARHRGWANPWWSLDQLEKASQEPSETFEIILARARELFGEKVPANPTLGMLGALAANNEVLLRPRDEKKRKTGYVRGTPLMFAQVRQGDQLAELRRICEVQGIEDQYEALRLGVFDHKHPYVPKERVGKDPLNPSTNRTIRASLEFQEFRILDSVANLRVRIGSRAKRELTEAEYDAAVEFLMDYADKEQPSWADVAEKIGVPGNRLVAPVLEDVQQKTAPYDRSSAAFEKAMGKKTEARQWWESTDDDQLRSLLIAFLVDATNDTEEAAAEAGLSELYKSWPAEEREALSNIDFEKGRVAYSQETLSKLSEYMHEYRVGLHEARKAVFGVDDTWRPPLDKLEEPTGQPAVDRVLTILRRFVLDCERQWGRPRAITVEHTRTGLMGPTQRQKILNEQKKNRADNERIRDELRESGVDNPSRAEVRRHLIVQEQECQCLYCGTMITTTTSELDHIVPRAGGGSSRRENLAAVCRACNAKKKRELFYAWAGPVKSQETIERVRQLKAFKDSKKAKMFKNQIRRLNQTEADEPIDERSLASTSYAAVAVRERLEQHFNEGLALDDKSRVVLDVYAGAVTRESRRAGGIDERILLRGERDKNRFDVRHHAVDAAVMTLLNRSVALTLEQRSQLRRAFYEQGLDKLDRDQLKPEEDWRNFIGLGTSGSETPGTSESATPESMTDSQNDTDEYWMGEALKLAQKAWDEGEVPVGAILVRKGEVIGHGWNRSIGSHDPSAHAEIMAIREAGVRIGNYRMLDTVLYVTFEPCAMCAGALVHGRISRLVFGAENPKTGACGSVMDIARHPALNHQLQVDGGVMAAPCARLLSDFFRWRRRQKKAARDNSSGNSGSETPGTSESATPESGTSLASQEKFLEWKKVTTVLGDLLAEAIEDDSIAVVSPLRLRPQNGRVHKDTIAAVKKQTLGSAWSADAVKRIVDPEIYLAMKDALGKSKVLPEDSARTLELSDGRYLEADDEVLFFPKNAASILTPRGVAEIGGSIHHARLYSWLTKKGELKIGMLRVYGAEFPWLMRESGSHDVLRMPIHPGSQSFRDMQDTTRKAVESSEAVEFAWITQNDELEFEPEDYIAHGGKDELRQFLEFMPECRWRVDGFKKNYQIRIRPAMLSREQLPSDIQRRLESKTLTENESLLLKALDTGLVVAIGGLLPLGTLKVIRRNNLGFPRWRGNGNLPTSFEVRSSALRALGVEGSGGKRPAATKKAGQAKKKK

SEQ ID NO: 1384 - protein, 1369 aa, unidentified
MAPKKKRKVGGGGSSTDMKNYRIGVAVGDRSVGLAAIEFDDDGLPIQKLALVTFRHDGGLDPTKNKTPMSRKETRGIARRTMRMNRERKRRLRNLDNVLENLGYSVPEGPEPETYEAWTSRALLASIKLASADELNEHLVRAVRHMARHRGWANPWWSLDQLEKASQEPSETFEIILARARELFGEKVPANPTLGMLGALAANNEVLLRPRDEKKRKTGYVRGTPLMFAQVRQGDQLAELRRICEVQGIEDQYEALRLGVFDHKHPYVPKERVGKDPLNPSTNRTIRASLEFQEFRILDSVANLRVRIGSRAKRELTEAEYDAAVEFLMDYADKEQPSWADVAEKIGVPGNRLVAPVLEDVQQKTAPYDRSSAAFEKAMGKKTEARQWWESTDDDQLRSLLIAFLVDATNDTEEAAAEAGLSELYKSWPAEEREALSNIDFEKGRVAYSQETLSKLSEYMHEYRVGLHEARKAVFGVDDTWRPPLDKLEEPTGQPAVDRVLTILRRFVLDCERQWGRPRAITVEHTRTGLMGPTQRQKILNEQKKNRADNERIRDELRESGVDNPSRAEVRRHLIVQEQECQCLYCGTMITTTTSELDHIVPRAGGGSSRRENLAAVCRACNAKKKRELFYAWAGPVKSQETIERVRQLKAFKDSKKAKMFKNQIRRLNQTEADEPIDERSLASTSYAAVAVRERLEQHFNEGLALDDKSRVVLDVYAGAVTRESRRAGGIDERILLRGERDKNRFDVRHHAVDAAVMTLLNRSVALTLEQRSQLRRAFYEQGLDKLDRDQLKPEEDWRNFIGLGTSGSETPGTSESATPESMTDSQNDTDEYWMGEALKLAQKAWDEGEVPVGAILVRKGEVIGHGWNRSIGSHDPSAHAEIMAIREAGVRIGNYRMLDTVLYVTLEPCAMCAGALVHGRISRLVFGAENPKRGACGSVMDIARHPALNNQLQVDGGVMAAPCARLLSDFFRWRRAQKKAARDNSSGNSGSETPGTSESATPESGTSLASQEKFLEWKKVTTVLGDLLAEAIEDDSIAVVSPLRLRPQNGRVHKDTIAAVKKQTLGSAWSADAVKRIVDPEIYLAMKDALGKSKVLPEDSARTLELSDGRYLEADDEVLFFPKNAASILTPRGVAEIGGSIHHARLYSWLTKKGELKIGMLRVYGAEFPWLMRESGSHDVLRMPIHPGSQSFRDMQDTTRKAVESSEAVEFAWITQNDELEFEPEDYIAHGGKDELRQFLEFMPECRWRVDGFKKNYQIRIRPAMLSREQLPSDIQRRLESKTLTENESLLLKALDTGLVVAIGGLLPLGTLKVIRRNNLGFPRWRGNGNLPTSFEVRSSALRALGVEGSGGKRPAATKKAGQAKKKK

SEQ ID NO: 1385 - protein, 1369 aa, unidentified
MAPKKKRKVGGGGSSTDMKNYRIGVAVGDRSVGLAAIEFDDDGLPIQKLALVTFRHDGGLDPTKNKTPMSRKETRGIARRTMRMNRERKRRLRNLDNVLENLGYSVPEGPEPETYEAWTSRALLASIKLASADELNEHLVRAVRHMARHRGWANPWWSLDQLEKASQEPSETFEIILARARELFGEKVPANPTLGMLGALAANNEVLLRPRDEKKRKTGYVRGTPLMFAQVRQGDQLAELRRICEVQGIEDQYEALRLGVFDHKHPYVPKERVGKDPLNPSTNRTIRASLEFQEFRILDSVANLRVRIGSRAKRELTEAEYDAAVEFLMDYADKEQPSWADVAEKIGVPGNRLVAPVLEDVQQKTAPYDRSSAAFEKAMGKKTEARQWWESTDDDQLRSLLIAFLVDATNDTEEAAAEAGLSELYKSWPAEEREALSNIDFEKGRVAYSQETLSKLSEYMHEYRVGLHEARKAVFGVDDTWRPPLDKLEEPTGQPAVDRVLTILRRFVLDCERQWGRPRAITVEHTRTGLMGPTQRQKILNEQKKNRADNERIRDELRESGVDNPSRAEVRRHLIVQEQECQCLYCGTMITTTTSELDHIVPRAGGGSSRRENLAAVCRACNAKKKRELFYAWAGPVKSQETIERVRQLKAFKDSKKAKMFKNQIRRLNQTEADEPIDERSLASTSYAAVAVRERLEQHFNEGLALDDKSRVVLDVYAGAVTRESRRAGGIDERILLRGERDKNRFDVRHHAVDAAVMTLLNRSVALTLEQRSQLRRAFYEQGLDKLDRDQLKPEEDWRNFIGLGTSGSETPGTSESATPESMTDSQNDTDEYWMGEALKLAQKAWDEGEVPVGAILVRKGEVIGHGWNRSIGSHDPSAHAEIMAIREAGVRIGNYRMLDTVLYVTLEPCAMCAGALVHGRISRLVFGAENPKRGACGSVMDIARHPALNHQLQVDGGVMAAPCARLLSRFFRWRRAQKKAARDNSSGNSGSETPGTSESATPESGTSLASQEKFLEWKKVTTVLGDLLAEAIEDDSIAVVSPLRLRPQNGRVHKDTIAAVKKQTLGSAWSADAVKRIVDPEIYLAMKDALGKSKVLPEDSARTLELSDGRYLEADDEVLFFPKNAASILTPRGVAEIGGSIHHARLYSWLTKKGELKIGMLRVYGAEFPWLMRESGSHDVLRMPIHPGSQSFRDMQDTTRKAVESSEAVEFAWITQNDELEFEPEDYIAHGGKDELRQFLEFMPECRWRVDGFKKNYQIRIRPAMLSREQLPSDIQRRLESKTLTENESLLLKALDTGLVVAIGGLLPLGTLKVIRRNNLGFPRWRGNGNLPTSFEVRSSALRALGVEGSGGKRPAATKKAGQAKKKK

SEQ ID NO: 1386 - protein, 1369 aa, unidentified
MAPKKKRKVGGGGSSTDMKNYRIGVAVGDRSVGLAAIEFDDDGLPIQKLALVTFRHDGGLDPTKNKTPMSRKETRGIARRTMRMNRERKRRLRNLDNVLENLGYSVPEGPEPETYEAWTSRALLASIKLASADELNEHLVRAVRHMARHRGWANPWWSLDQLEKASQEPSETFEIILARARELFGEKVPANPTLGMLGALAANNEVLLRPRDEKKRKTGYVRGTPLMFAQVRQGDQLAELRRICEVQGIEDQYEALRLGVFDHKHPYVPKERVGKDPLNPSTNRTIRASLEFQEFRILDSVANLRVRIGSRAKRELTEAEYDAAVEFLMDYADKEQPSWADVAEKIGVPGNRLVAPVLEDVQQKTAPYDRSSAAFEKAMGKKTEARQWWESTDDDQLRSLLIAFLVDATNDTEEAAAEAGLSELYKSWPAEEREALSNIDFEKGRVAYSQETLSKLSEYMHEYRVGLHEARKAVFGVDDTWRPPLDKLEEPTGQPAVDRVLTILRRFVLDCERQWGRPRAITVEHTRTGLMGPTQRQKILNEQKKNRADNERIRDELRESGVDNPSRAEVRRHLIVQEQECQCLYCGTMITTTTSELDHIVPRAGGGSSRRENLAAVCRACNAKKKRELFYAWAGPVKSQETIERVRQLKAFKDSKKAKMFKNQIRRLNQTEADEPIDERSLASTSYAAVAVRERLEQHFNEGLALDDKSRVVLDVYAGAVTRESRRAGGIDERILLRGERDKNRFDVRHHAVDAAVMTLLNRSVALTLEQRSQLRRAFYEQGLDKLDRDQLKPEEDWRNFIGLGTSGSETPGTSESATPESMTDSQNDTDEYWMGEALKLAQKAWDEGEVPVGAILVRKGEVIGHGWNRSIGSHDPSAHAEIMAIREAGVRIGNYRMLDTVLYVTLEPCAMCAGALVHGRISRLVFGAENPKRGACGSVMDIARHPALNHQLQVDGGVMAAPCARLLSDFFRWRRRQKKAARDNSSGNSGSETPGTSESATPESGTSLASQEKFLEWKKVTTVLGDLLAEAIEDDSIAVVSPLRLRPQNGRVHKDTIAAVKKQTLGSAWSADAVKRIVDPEIYLAMKDALGKSKVLPEDSARTLELSDGRYLEADDEVLFFPKNAASILTPRGVAEIGGSIHHARLYSWLTKKGELKIGMLRVYGAEFPWLMRESGSHDVLRMPIHPGSQSFRDMQDTTRKAVESSEAVEFAWITQNDELEFEPEDYIAHGGKDELRQFLEFMPECRWRVDGFKKNYQIRIRPAMLSREQLPSDIQRRLESKTLTENESLLLKALDTGLVVAIGGLLPLGTLKVIRRNNLGFPRWRGNGNLPTSFEVRSSALRALGVEGSGGKRPAATKKAGQAKKKK

SEQ ID NO: 1387 - protein, 1369 aa, unidentified
MAPKKKRKVGGGGSSTDMKNYRIGVAVGDRSVGLAAIEFDDDGLPIQKLALVTFRHDGGLDPTKNKTPMSRKETRGIARRTMRMNRERKRRLRNLDNVLENLGYSVPEGPEPETYEAWTSRALLASIKLASADELNEHLVRAVRHMARHRGWANPWWSLDQLEKASQEPSETFEIILARARELFGEKVPANPTLGMLGALAANNEVLLRPRDEKKRKTGYVRGTPLMFAQVRQGDQLAELRRICEVQGIEDQYEALRLGVFDHKHPYVPKERVGKDPLNPSTNRTIRASLEFQEFRILDSVANLRVRIGSRAKRELTEAEYDAAVEFLMDYADKEQPSWADVAEKIGVPGNRLVAPVLEDVQQKTAPYDRSSAAFEKAMGKKTEARQWWESTDDDQLRSLLIAFLVDATNDTEEAAAEAGLSELYKSWPAEEREALSNIDFEKGRVAYSQETLSKLSEYMHEYRVGLHEARKAVFGVDDTWRPPLDKLEEPTGQPAVDRVLTILRRFVLDCERQWGRPRAITVEHTRTGLMGPTQRQKILNEQKKNRADNERIRDELRESGVDNPSRAEVRRHLIVQEQECQCLYCGTMITTTTSELDHIVPRAGGGSSRRENLAAVCRACNAKKKRELFYAWAGPVKSQETIERVRQLKAFKDSKKAKMFKNQIRRLNQTEADEPIDERSLASTSYAAVAVRERLEQHFNEGLALDDKSRVVLDVYAGAVTRESRRAGGIDERILLRGERDKNRFDVRHHAVDAAVMTLLNRSVALTLEQRSQLRRAFYEQGLDKLDRDQLKPEEDWRNFIGLGTSGSETPGTSESATPESMTDSQNDTDEYWMGEALKLAQKAWDEGEVPVGAILVRKGEVIGHGWNRSIGSHDPSAHAEIMAIREAGVRIGNYRMLDTVLYVTLEPCAMCAGALVHGRISRLVFGAENPKTGACGSVMDIARHPALNNQLQVDGGVMAAPCARLLSRFFRWRRAQKKAARDNSSGNSGSETPGTSESATPESGTSLASQEKFLEWKKVTTVLGDLLAEAIEDDSIAVVSPLRLRPQNGRVHKDTIAAVKKQTLGSAWSADAVKRIVDPEIYLAMKDALGKSKVLPEDSARTLELSDGRYLEADDEVLFFPKNAASILTPRGVAEIGGSIHHARLYSWLTKKGELKIGMLRVYGAEFPWLMRESGSHDVLRMPIHPGSQSFRDMQDTTRKAVESSEAVEFAWITQNDELEFEPEDYIAHGGKDELRQFLEFMPECRWRVDGFKKNYQIRIRPAMLSREQLPSDIQRRLESKTLTENESLLLKALDTGLVVAIGGLLPLGTLKVIRRNNLGFPRWRGNGNLPTSFEVRSSALRALGVEGSGGKRPAATKKAGQAKKKK

SEQ ID NO: 1388 - protein, 1369 aa, unidentified
MAPKKKRKVGGGGSSTDMKNYRIGVAVGDRSVGLAAIEFDDDGLPIQKLALVTFRHDGGLDPTKNKTPMSRKETRGIARRTMRMNRERKRRLRNLDNVLENLGYSVPEGPEPETYEAWTSRALLASIKLASADELNEHLVRAVRHMARHRGWANPWWSLDQLEKASQEPSETFEIILARARELFGEKVPANPTLGMLGALAANNEVLLRPRDEKKRKTGYVRGTPLMFAQVRQGDQLAELRRICEVQGIEDQYEALRLGVFDHKHPYVPKERVGKDPLNPSTNRTIRASLEFQEFRILDSVANLRVRIGSRAKRELTEAEYDAAVEFLMDYADKEQPSWADVAEKIGVPGNRLVAPVLEDVQQKTAPYDRSSAAFEKAMGKKTEARQWWESTDDDQLRSLLIAFLVDATNDTEEAAAEAGLSELYKSWPAEEREALSNIDFEKGRVAYSQETLSKLSEYMHEYRVGLHEARKAVFGVDDTWRPPLDKLEEPTGQPAVDRVLTILRRFVLDCERQWGRPRAITVEHTRTGLMGPTQRQKILNEQKKNRADNERIRDELRESGVDNPSRAEVRRHLIVQEQECQCLYCGTMITTTTSELDHIVPRAGGGSSRRENLAAVCRACNAKKKRELFYAWAGPVKSQETIERVRQLKAFKDSKKAKMFKNQIRRLNQTEADEPIDERSLASTSYAAVAVRERLEQHFNEGLALDDKSRVVLDVYAGAVTRESRRAGGIDERILLRGERDKNRFDVRHHAVDAAVMTLLNRSVALTLEQRSQLRRAFYEQGLDKLDRDQLKPEEDWRNFIGLGTSGSETPGTSESATPESMTDSQNDTDEYWMGEALKLAQKAWDEGEVPVGAILVRKGEVIGHGWNRSIGSHDPSAHAEIMAIREAGVRIGNYRMLDTVLYVTLEPCAMCAGALVHGRISRLVFGAENPKTGACGSVMDIARHPALNNQLQVDGGVMAAPCARLLSDFFRWRRRQKKAARDNSSGNSGSETPGTSESATPESGTSLASQEKFLEWKKVTTVLGDLLAEAIEDDSIAVVSPLRLRPQNGRVHKDTIAAVKKQTLGSAWSADAVKRIVDPEIYLAMKDALGKSKVLPEDSARTLELSDGRYLEADDEVLFFPKNAASILTPRGVAEIGGSIHHARLYSWLTKKGELKIGMLRVYGAEFPWLMRESGSHDVLRMPIHPGSQSFRDMQDTTRKAVESSEAVEFAWITQNDELEFEPEDYIAHGGKDELRQFLEFMPECRWRVDGFKKNYQIRIRPAMLSREQLPSDIQRRLESKTLTENESLLLKALDTGLVVAIGGLLPLGTLKVIRRNNLGFPRWRGNGNLPTSFEVRSSALRALGVEGSGGKRPAATKKAGQAKKKK

SEQ ID NO: 1389 - protein, 1369 aa, unidentified
MAPKKKRKVGGGGSSTDMKNYRIGVAVGDRSVGLAAIEFDDDGLPIQKLALVTFRHDGGLDPTKNKTPMSRKETRGIARRTMRMNRERKRRLRNLDNVLENLGYSVPEGPEPETYEAWTSRALLASIKLASADELNEHLVRAVRHMARHRGWANPWWSLDQLEKASQEPSETFEIILARARELFGEKVPANPTLGMLGALAANNEVLLRPRDEKKRKTGYVRGTPLMFAQVRQGDQLAELRRICEVQGIEDQYEALRLGVFDHKHPYVPKERVGKDPLNPSTNRTIRASLEFQEFRILDSVANLRVRIGSRAKRELTEAEYDAAVEFLMDYADKEQPSWADVAEKIGVPGNRLVAPVLEDVQQKTAPYDRSSAAFEKAMGKKTEARQWWESTDDDQLRSLLIAFLVDATNDTEEAAAEAGLSELYKSWPAEEREALSNIDFEKGRVAYSQETLSKLSEYMHEYRVGLHEARKAVFGVDDTWRPPLDKLEEPTGQPAVDRVLTILRRFVLDCERQWGRPRAITVEHTRTGLMGPTQRQKILNEQKKNRADNERIRDELRESGVDNPSRAEVRRHLIVQEQECQCLYCGTMITTTTSELDHIVPRAGGGSSRRENLAAVCRACNAKKKRELFYAWAGPVKSQETIERVRQLKAFKDSKKAKMFKNQIRRLNQTEADEPIDERSLASTSYAAVAVRERLEQHFNEGLALDDKSRVVLDVYAGAVTRESRRAGGIDERILLRGERDKNRFDVRHHAVDAAVMTLLNRSVALTLEQRSQLRRAFYEQGLDKLDRDQLKPEEDWRNFIGLGTSGSETPGTSESATPESMTDSQNDTDEYWMGEALKLAQKAWDEGEVPVGAILVRKGEVIGHGWNRSIGSHDPSAHAEIMAIREAGVRIGNYRMLDTVLYVTLEPCAMCAGALVHGRISRLVFGAENPKTGACGSVMDIARHPALNHQLQVDGGVMAAPCARLLSRFFRWRRRQKKAARDNSSGNSGSETPGTSESATPESGTSLASQEKFLEWKKVTTVLGDLLAEAIEDDSIAVVSPLRLRPQNGRVHKDTIAAVKKQTLGSAWSADAVKRIVDPEIYLAMKDALGKSKVLPEDSARTLELSDGRYLEADDEVLFFPKNAASILTPRGVAEIGGSIHHARLYSWLTKKGELKIGMLRVYGAEFPWLMRESGSHDVLRMPIHPGSQSFRDMQDTTRKAVESSEAVEFAWITQNDELEFEPEDYIAHGGKDELRQFLEFMPECRWRVDGFKKNYQIRIRPAMLSREQLPSDIQRRLESKTLTENESLLLKALDTGLVVAIGGLLPLGTLKVIRRNNLGFPRWRGNGNLPTSFEVRSSALRALGVEGSGGKRPAATKKAGQAKKKK

SEQ ID NO: 1390 - protein, 1369 aa, unidentified
MAPKKKRKVGGGGSSTDMKNYRIGVAVGDRSVGLAAIEFDDDGLPIQKLALVTFRHDGGLDPTKNKTPMSRKETRGIARRTMRMNRERKRRLRNLDNVLENLGYSVPEGPEPETYEAWTSRALLASIKLASADELNEHLVRAVRHMARHRGWANPWWSLDQLEKASQEPSETFEIILARARELFGEKVPANPTLGMLGALAANNEVLLRPRDEKKRKTGYVRGTPLMFAQVRQGDQLAELRRICEVQGIEDQYEALRLGVFDHKHPYVPKERVGKDPLNPSTNRTIRASLEFQEFRILDSVANLRVRIGSRAKRELTEAEYDAAVEFLMDYADKEQPSWADVAEKIGVPGNRLVAPVLEDVQQKTAPYDRSSAAFEKAMGKKTEARQWWESTDDDQLRSLLIAFLVDATNDTEEAAAEAGLSELYKSWPAEEREALSNIDFEKGRVAYSQETLSKLSEYMHEYRVGLHEARKAVFGVDDTWRPPLDKLEEPTGQPAVDRVLTILRRFVLDCERQWGRPRAITVEHTRTGLMGPTQRQKILNEQKKNRADNERIRDELRESGVDNPSRAEVRRHLIVQEQECQCLYCGTMITTTTSELDHIVPRAGGGSSRRENLAAVCRACNAKKKRELFYAWAGPVKSQETIERVRQLKAFKDSKKAKMFKNQIRRLNQTEADEPIDERSLASTSYAAVAVRERLEQHFNEGLALDDKSRVVLDVYAGAVTRESRRAGGIDERILLRGERDKNRFDVRHHAVDAAVMTLLNRSVALTLEQRSQLRRAFYEQGLDKLDRDQLKPEEDWRNFIGLGTSGSETPGTSESATPESMTDSQNDTDEYWMGEALKLAQKAWDEGEVPVGAILVRKGEVIGHGWNRSIGSHDPSAHAEIMAIREAGVRIGNYRMLDTVLYSTFEPCAMCAGALVHGRISRLVFGAENPKRGACGSVMDIARHPALNHQLQVDGGVMAAPCARLLSDFFRWRRAQKKAARDNSSGNSGSETPGTSESATPESGTSLASQEKFLEWKKVTTVLGDLLAEAIEDDSIAVVSPLRLRPQNGRVHKDTIAAVKKQTLGSAWSADAVKRIVDPEIYLAMKDALGKSKVLPEDSARTLELSDGRYLEADDEVLFFPKNAASILTPRGVAEIGGSIHHARLYSWLTKKGELKIGMLRVYGAEFPWLMRESGSHDVLRMPIHPGSQSFRDMQDTTRKAVESSEAVEFAWITQNDELEFEPEDYIAHGGKDELRQFLEFMPECRWRVDGFKKNYQIRIRPAMLSREQLPSDIQRRLESKTLTENESLLLKALDTGLVVAIGGLLPLGTLKVIRRNNLGFPRWRGNGNLPTSFEVRSSALRALGVEGSGGKRPAATKKAGQAKKKK

SEQ ID NO: 1391 - protein, 1369 aa, unidentified
MAPKKKRKVGGGGSSTDMKNYRIGVAVGDRSVGLAAIEFDDDGLPIQKLALVTFRHDGGLDPTKNKTPMSRKETRGIARRTMRMNRERKRRLRNLDNVLENLGYSVPEGPEPETYEAWTSRALLASIKLASADELNEHLVRAVRHMARHRGWANPWWSLDQLEKASQEPSETFEIILARARELFGEKVPANPTLGMLGALAANNEVLLRPRDEKKRKTGYVRGTPLMFAQVRQGDQLAELRRICEVQGIEDQYEALRLGVFDHKHPYVPKERVGKDPLNPSTNRTIRASLEFQEFRILDSVANLRVRIGSRAKRELTEAEYDAAVEFLMDYADKEQPSWADVAEKIGVPGNRLVAPVLEDVQQKTAPYDRSSAAFEKAMGKKTEARQWWESTDDDQLRSLLIAFLVDATNDTEEAAAEAGLSELYKSWPAEEREALSNIDFEKGRVAYSQETLSKLSEYMHEYRVGLHEARKAVFGVDDTWRPPLDKLEEPTGQPAVDRVLTILRRFVLDCERQWGRPRAITVEHTRTGLMGPTQRQKILNEQKKNRADNERIRDELRESGVDNPSRAEVRRHLIVQEQECQCLYCGTMITTTTSELDHIVPRAGGGSSRRENLAAVCRACNAKKKRELFYAWAGPVKSQETIERVRQLKAFKDSKKAKMFKNQIRRLNQTEADEPIDERSLASTSYAAVAVRERLEQHFNEGLALDDKSRVVLDVYAGAVTRESRRAGGIDERILLRGERDKNRFDVRHHAVDAAVMTLLNRSVALTLEQRSQLRRAFYEQGLDKLDRDQLKPEEDWRNFIGLGTSGSETPGTSESATPESMTDSQNDTDEYWMGEALKLAQKAWDEGEVPVGAILVRKGEVIGHGWNRSIGSHDPSAHAEIMAIREAGVRIGNYRMLDTVLYSTFEPCAMCAGALVHGRISRLVFGAENPKTGACGSVMDIARHPALNNQLQVDGGVMAAPCARLLSDFFRWRRAQKKAARDNSSGNSGSETPGTSESATPESGTSLASQEKFLEWKKVTTVLGDLLAEAIEDDSIAVVSPLRLRPQNGRVHKDTIAAVKKQTLGSAWSADAVKRIVDPEIYLAMKDALGKSKVLPEDSARTLELSDGRYLEADDEVLFFPKNAASILTPRGVAEIGGSIHHARLYSWLTKKGELKIGMLRVYGAEFPWLMRESGSHDVLRMPIHPGSQSFRDMQDTTRKAVESSEAVEFAWITQNDELEFEPEDYIAHGGKDELRQFLEFMPECRWRVDGFKKNYQIRIRPAMLSREQLPSDIQRRLESKTLTENESLLLKALDTGLVVAIGGLLPLGTLKVIRRNNLGFPRWRGNGNLPTSFEVRSSALRALGVEGSGGKRPAATKKAGQAKKKK

SEQ ID NO: 1392 - protein, 1369 aa, unidentified
MAPKKKRKVGGGGSSTDMKNYRIGVAVGDRSVGLAAIEFDDDGLPIQKLALVTFRHDGGLDPTKNKTPMSRKETRGIARRTMRMNRERKRRLRNLDNVLENLGYSVPEGPEPETYEAWTSRALLASIKLASADELNEHLVRAVRHMARHRGWANPWWSLDQLEKASQEPSETFEIILARARELFGEKVPANPTLGMLGALAANNEVLLRPRDEKKRKTGYVRGTPLMFAQVRQGDQLAELRRICEVQGIEDQYEALRLGVFDHKHPYVPKERVGKDPLNPSTNRTIRASLEFQEFRILDSVANLRVRIGSRAKRELTEAEYDAAVEFLMDYADKEQPSWADVAEKIGVPGNRLVAPVLEDVQQKTAPYDRSSAAFEKAMGKKTEARQWWESTDDDQLRSLLIAFLVDATNDTEEAAAEAGLSELYKSWPAEEREALSNIDFEKGRVAYSQETLSKLSEYMHEYRVGLHEARKAVFGVDDTWRPPLDKLEEPTGQPAVDRVLTILRRFVLDCERQWGRPRAITVEHTRTGLMGPTQRQKILNEQKKNRADNERIRDELRESGVDNPSRAEVRRHLIVQEQECQCLYCGTMITTTTSELDHIVPRAGGGSSRRENLAAVCRACNAKKKRELFYAWAGPVKSQETIERVRQLKAFKDSKKAKMFKNQIRRLNQTEADEPIDERSLASTSYAAVAVRERLEQHFNEGLALDDKSRVVLDVYAGAVTRESRRAGGIDERILLRGERDKNRFDVRHHAVDAAVMTLLNRSVALTLEQRSQLRRAFYEQGLDKLDRDQLKPEEDWRNFIGLGTSGSETPGTSESATPESMTDSQNDTDEYWMGEALKLAQKAWDEGEVPVGAILVRKGEVIGHGWNRSIGSHDPSAHAEIMAIREAGVRIGNYRMLDTVLYSTLEPCAMCAGALVHGRISRLVFGAENPKRGACGSVMDIARHPALNNQLQVDGGVMAAPCARLLSDFFRWRRAQKKAARDNSSGNSGSETPGTSESATPESGTSLASQEKFLEWKKVTTVLGDLLAEAIEDDSIAVVSPLRLRPQNGRVHKDTIAAVKKQTLGSAWSADAVKRIVDPEIYLAMKDALGKSKVLPEDSARTLELSDGRYLEADDEVLFFPKNAASILTPRGVAEIGGSIHHARLYSWLTKKGELKIGMLRVYGAEFPWLMRESGSHDVLRMPIHPGSQSFRDMQDTTRKAVESSEAVEFAWITQNDELEFEPEDYIAHGGKDELRQFLEFMPECRWRVDGFKKNYQIRIRPAMLSREQLPSDIQRRLESKTLTENESLLLKALDTGLVVAIGGLLPLGTLKVIRRNNLGFPRWRGNGNLPTSFEVRSSALRALGVEGSGGKRPAATKKAGQAKKKK

SEQ ID NO: 1393 - protein, 1369 aa, unidentified; identical to SEQ ID NO: 1391

SEQ ID NO: 1394 - protein, 1369 aa, unidentified
MAPKKKRKVGGGGSSTDMKNYRIGVAVGDRSVGLAAIEFDDDGLPIQKLALVTFRHDGGLDPTKNKTPMSRKETRGIARRTMRMNRERKRRLRNLDNVLENLGYSVPEGPEPETYEAWTSRALLASIKLASADELNEHLVRAVRHMARHRGWANPWWSLDQLEKASQEPSETFEIILARARELFGEKVPANPTLGMLGALAANNEVLLRPRDEKKRKTGYVRGTPLMFAQVRQGDQLAELRRICEVQGIEDQYEALRLGVFDHKHPYVPKERVGKDPLNPSTNRTIRASLEFQEFRILDSVANLRVRIGSRAKRELTEAEYDAAVEFLMDYADKEQPSWADVAEKIGVPGNRLVAPVLEDVQQKTAPYDRSSAAFEKAMGKKTEARQWWESTDDDQLRSLLIAFLVDATNDTEEAAAEAGLSELYKSWPAEEREALSNIDFEKGRVAYSQETLSKLSEYMHEYRVGLHEARKAVFGVDDTWRPPLDKLEEPTGQPAVDRVLTILRRFVLDCERQWGRPRAITVEHTRTGLMGPTQRQKILNEQKKNRADNERIRDELRESGVDNPSRAEVRRHLIVQEQECQCLYCGTMITTTTSELDHIVPRAGGGSSRRENLAAVCRACNAKKKRELFYAWAGPVKSQETIERVRQLKAFKDSKKAKMFKNQIRRLNQTEADEPIDERSLASTSYAAVAVRERLEQHFNEGLALDDKSRVVLDVYAGAVTRESRRAGGIDERILLRGERDKNRFDVRHHAVDAAVMTLLNRSVALTLEQRSQLRRAFYEQGLDKLDRDQLKPEEDWRNFIGLGTSGSETPGTSESATPESMTDSQNDTDEYWMGEALKLAQKAWDEGEVPVGAILVRKGEVIGHGWNRSIGSHDPSAHAEIMAIREAGVRIGNYRMLDTVLYSTFEPCAMCAGALVHGRISRLVFGAENPKRGACGSVMDIARHPALNNQLQVDGGVMAAPCARLLSDFFRWRRAQKKAARDNSSGNSGSETPGTSESATPESGTSLASQEKFLEWKKVTTVLGDLLAEAIEDDSIAVVSPLRLRPQNGRVHKDTIAAVKKQTLGSAWSADAVKRIVDPEIYLAMKDALGKSKVLPEDSARTLELSDGRYLEADDEVLFFPKNAASILTPRGVAEIGGSIHHARLYSWLTKKGELKIGMLRVYGAEFPWLMRESGSHDVLRMPIHPGSQSFRDMQDTTRKAVESSEAVEFAWITQNDELEFEPEDYIAHGGKDELRQFLEFMPECRWRVDGFKKNYQIRIRPAMLSREQLPSDIQRRLESKTLTENESLLLKALDTGLVVAIGGLLPLGTLKVIRRNNLGFPRWRGNGNLPTSFEVRSSALRALGVEGSGGKRPAATKKAGQAKKKK

SEQ ID NO: 1395 - protein, 1369 aa, unidentified
MAPKKKRKVGGGGSSTDMKNYRIGVAVGDRSVGLAAIEFDDDGLPIQKLALVTFRHDGGLDPTKNKTPMSRKETRGIARRTMRMNRERKRRLRNLDNVLENLGYSVPEGPEPETYEAWTSRALLASIKLASADELNEHLVRAVRHMARHRGWANPWWSLDQLEKASQEPSETFEIILARARELFGEKVPANPTLGMLGALAANNEVLLRPRDEKKRKTGYVRGTPLMFAQVRQGDQLAELRRICEVQGIEDQYEALRLGVFDHKHPYVPKERVGKDPLNPSTNRTIRASLEFQEFRILDSVANLRVRIGSRAKRELTEAEYDAAVEFLMDYADKEQPSWADVAEKIGVPGNRLVAPVLEDVQQKTAPYDRSSAAFEKAMGKKTEARQWWESTDDDQLRSLLIAFLVDATNDTEEAAAEAGLSELYKSWPAEEREALSNIDFEKGRVAYSQETLSKLSEYMHEYRVGLHEARKAVFGVDDTWRPPLDKLEEPTGQPAVDRVLTILRRFVLDCERQWGRPRAITVEHTRTGLMGPTQRQKILNEQKKNRADNERIRDELRESGVDNPSRAEVRRHLIVQEQECQCLYCGTMITTTTSELDHIVPRAGGGSSRRENLAAVCRACNAKKKRELFYAWAGPVKSQETIERVRQLKAFKDSKKAKMFKNQIRRLNQTEADEPIDERSLASTSYAAVAVRERLEQHFNEGLALDDKSRVVLDVYAGAVTRESRRAGGIDERILLRGERDKNRFDVRHHAVDAAVMTLLNRSVALTLEQRSQLRRAFYEQGLDKLDRDQLKPEEDWRNFIGLGTSGSETPGTSESATPESMTDSQNGTDGYWMGEALKLAQKAWDEGEVPVGAILVRKGEVIGHGWNRSIGSHDPSAHAEIMAIREAGVRIGNYRMLDTVLYSTFEPCAMCAGALVHGRISRLVFGAENPKRGACGSVMDIARHPALNNQLQVDGGVMAAPCARLLSRFFRWRRRQKKAARDNSSGNSGSETPGTSESATPESGTSLASQEKFLEWKKVTTVLGDLLAEAIEDDSIAVVSPLRLRPQNGRVHKDTIAAVKKQTLGSAWSADAVKRIVDPEIYLAMKDALGKSKVLPEDSARTLELSDGRYLEADDEVLFFPKNAASILTPRGVAEIGGSIHHARLYSWLTKKGELKIGMLRVYGAEFPWLMRESGSHDVLRMPIHPGSQSFRDMQDTTRKAVESSEAVEFAWITQNDELEFEPEDYIAHGGKDELRQFLEFMPECRWRVDGFKKNYQIRIRPAMLSREQLPSDIQRRLESKTLTENESLLLKALDTGLVVAIGGLLPLGTLKVIRRNNLGFPRWRGNGNLPTSFEVRSSALRALGVEGSGGKRPAATKKAGQAKKKK

SEQ ID NO: 1396 - protein, 1369 aa, unidentified
MAPKKKRKVGGGGSSTDMKNYRIGVAVGDRSVGLAAIEFDDDGLPIQKLALVTFRHDGGLDPTKNKTPMSRKETRGIARRTMRMNRERKRRLRNLDNVLENLGYSVPEGPEPETYEAWTSRALLASIKLASADELNEHLVRAVRHMARHRGWANPWWSLDQLEKASQEPSETFEIILARARELFGEKVPANPTLGMLGALAANNEVLLRPRDEKKRKTGYVRGTPLMFAQVRQGDQLAELRRICEVQGIEDQYEALRLGVFDHKHPYVPKERVGKDPLNPSTNRTIRASLEFQEFRILDSVANLRVRIGSRAKRELTEAEYDAAVEFLMDYADKEQPSWADVAEKIGVPGNRLVAPVLEDVQQKTAPYDRSSAAFEKAMGKKTEARQWWESTDDDQLRSLLIAFLVDATNDTEEAAAEAGLSELYKSWPAEEREALSNIDFEKGRVAYSQETLSKLSEYMHEYRVGLHEARKAVFGVDDTWRPPLDKLEEPTGQPAVDRVLTILRRFVLDCERQWGRPRAITVEHTRTGLMGPTQRQKILNEQKKNRADNERIRDELRESGVDNPSRAEVRRHLIVQEQECQCLYCGTMITTTTSELDHIVPRAGGGSSRRENLAAVCRACNAKKKRELFYAWAGPVKSQETIERVRQLKAFKDSKKAKMFKNQIRRLNQTEADEPIDERSLASTSYAAVAVRERLEQHFNEGLALDDKSRVVLDVYAGAVTRESRRAGGIDERILLRGERDKNRFDVRHHAVDAAVMTLLNRSVALTLEQRSQLRRAFYEQGLDKLDRDQLKPEEDWRNFIGLGTSGSETPGTSESATPESMTDSQNDTDGYWMGEALKLAQKAWDEGEVPVGAILVRKGEVIGHGWNRSIGSHDPSAHAEIMAIREAGVRIGNYRMLDTVLYSTFEPCAMCAGALVHGRISRLVFGAENPKRGACGSVMDIARHPALNNQLQVDGGVMAAPCARLLSRFFRWRRRQKKAARDNSSGNSGSETPGTSESATPESGTSLASQEKFLEWKKVTTVLGDLLAEAIEDDSIAVVSPLRLRPQNGRVHKDTIAAVKKQTLGSAWSADAVKRIVDPEIYLAMKDALGKSKVLPEDSARTLELSDGRYLEADDEVLFFPKNAASILTPRGVAEIGGSIHHARLYSWLTKKGELKIGMLRVYGAEFPWLMRESGSHDVLRMPIHPGSQSFRDMQDTTRKAVESSEAVEFAWITQNDELEFEPEDYIAHGGKDELRQFLEFMPECRWRVDGFKKNYQIRIRPAMLSREQLPSDIQRRLESKTLTENESLLLKALDTGLVVAIGGLLPLGTLKVIRRNNLGFPRWRGNGNLPTSFEVRSSALRALGVEGSGGKRPAATKKAGQAKKKK

SEQ ID NO: 1397 - protein, 1369 aa, unidentified
MAPKKKRKVGGGGSSTDMKNYRIGVAVGDRSVGLAAIEFDDDGLPIQKLALVTFRHDGGLDPTKNKTPMSRKETRGIARRTMRMNRERKRRLRNLDNVLENLGYSVPEGPEPETYEAWTSRALLASIKLASADELNEHLVRAVRHMARHRGWANPWWSLDQLEKASQEPSETFEIILARARELFGEKVPANPTLGMLGALAANNEVLLRPRDEKKRKTGYVRGTPLMFAQVRQGDQLAELRRICEVQGIEDQYEALRLGVFDHKHPYVPKERVGKDPLNPSTNRTIRASLEFQEFRILDSVANLRVRIGSRAKRELTEAEYDAAVEFLMDYADKEQPSWADVAEKIGVPGNRLVAPVLEDVQQKTAPYDRSSAAFEKAMGKKTEARQWWESTDDDQLRSLLIAFLVDATNDTEEAAAEAGLSELYKSWPAEEREALSNIDFEKGRVAYSQETLSKLSEYMHEYRVGLHEARKAVFGVDDTWRPPLDKLEEPTGQPAVDRVLTILRRFVLDCERQWGRPRAITVEHTRTGLMGPTQRQKILNEQKKNRADNERIRDELRESGVDNPSRAEVRRHLIVQEQECQCLYCGTMITTTTSELDHIVPRAGGGSSRRENLAAVCRACNAKKKRELFYAWAGPVKSQETIERVRQLKAFKDSKKAKMFKNQIRRLNQTEADEPIDERSLASTSYAAVAVRERLEQHFNEGLALDDKSRVVLDVYAGAVTRESRRAGGIDERILLRGERDKNRFDVRHHAVDAAVMTLLNRSVALTLEQRSQLRRAFYEQGLDKLDRDQLKPEEDWRNFIGLGTSGSETPGTSESATPESMTDSQNGTDEYWMGEALKLAQKAWDEGEVPVGAILVRKGEVIGHGWNRSIGSHDPSAHAEIMAIREAGVRIGNYRMLDTVLYSTFEPCAMCAGALVHGRISRLVFGAENPKRGACGSVMDIARHPALNNQLQVDGGVMAAPCARLLSRFFRWRRRQKKAARDNSSGNSGSETPGTSESATPESGTSLASQEKFLEWKKVTTVLGDLLAEAIEDDSIAVVSPLRLRPQNGRVHKDTIAAVKKQTLGSAWSADAVKRIVDPEIYLAMKDALGKSKVLPEDSARTLELSDGRYLEADDEVLFFPKNAASILTPRGVAEIGGSIHHARLYSWLTKKGELKIGMLRVYGAEFPWLMRESGSHDVLRMPIHPGSQSFRDMQDTTRKAVESSEAVEFAWITQNDELEFEPEDYIAHGGKDELRQFLEFMPECRWRVDGFKKNYQIRIRPAMLSREQLPSDIQRRLESKTLTENESLLLKALDTGLVVAIGGLLPLGTLKVIRRNNLGFPRWRGNGNLPTSFEVRSSALRALGVEGSGGKRPAATKKAGQAKKKK

SEQ ID NO: 1398 - protein, 1369 aa, unidentified
MAPKKKRKVGGGGSSTDMKNYRIGVAVGDRSVGLAAIEFDDDGLPIQKLALVTFRHDGGLDPTKNKTPMSRKETRGIARRTMRMNRERKRRLRNLDNVLENLGYSVPEGPEPETYEAWTSRALLASIKLASADELNEHLVRAVRHMARHRGWANPWWSLDQLEKASQEPSETFEIILARARELFGEKVPANPTLGMLGALAANNEVLLRPRDEKKRKTGYVRGTPLMFAQVRQGDQLAELRRICEVQGIEDQYEALRLGVFDHKHPYVPKERVGKDPLNPSTNRTIRASLEFQEFRILDSVANLRVRIGSRAKRELTEAEYDAAVEFLMDYADKEQPSWADVAEKIGVPGNRLVAPVLEDVQQKTAPYDRSSAAFEKAMGKKTEARQWWESTDDDQLRSLLIAFLVDATNDTEEAAAEAGLSELYKSWPAEEREALSNIDFEKGRVAYSQETLSKLSEYMHEYRVGLHEARKAVFGVDDTWRPPLDKLEEPTGQPAVDRVLTILRRFVLDCERQWGRPRAITVEHTRTGLMGPTQRQKILNEQKKNRADNERIRDELRESGVDNPSRAEVRRHLIVQEQECQCLYCGTMITTTTSELDHIVPRAGGGSSRRENLAAVCRACNAKKKRELFYAWAGPVKSQETIERVRQLKAFKDSKKAKMFKNQIRRLNQTEADEPIDERSLASTSYAAVAVRERLEQHFNEGLALDDKSRVVLDVYAGAVTRESRRAGGIDERILLRGERDKNRFDVRHHAVDAAVMTLLNRSVALTLEQRSQLRRAFYEQGLDKLDRDQLKPEEDWRNFIGLGTSGSETPGTSESATPESMTDSQNGTDGYWMGEALKLAQKAWDEGEVPVGAILVRKGEVIGHGWNRSIGSHDPSAHAEIMAIREAGVRIGNYRMLDTVLYVTFEPCAMCAGALVHGRISRLVFGAENPKRGACGSVMDIARHPALNNQLQVDGGVMAAPCARLLSRFFRWRRRQKKAARDNSSGNSGSETPGTSESATPESGTSLASQEKFLEWKKVTTVLGDLLAEAIEDDSIAVVSPLRLRPQNGRVHKDTIAAVKKQTLGSAWSADAVKRIVDPEIYLAMKDALGKSKVLPEDSARTLELSDGRYLEADDEVLFFPKNAASILTPRGVAEIGGSIHHARLYSWLTKKGELKIGMLRVYGAEFPWLMRESGSHDVLRMPIHPGSQSFRDMQDTTRKAVESSEAVEFAWITQNDELEFEPEDYIAHGGKDELRQFLEFMPECRWRVDGFKKNYQIRIRPAMLSREQLPSDIQRRLESKTLTENESLLLKALDTGLVVAIGGLLPLGTLKVIRRNNLGFPRWRGNGNLPTSFEVRSSALRALGVEGSGGKRPAATKKAGQAKKKK

SEQ ID NO: 1399 - protein, 1369 aa, unidentified
MAPKKKRKVGGGGSSTDMKNYRIGVAVGDRSVGLAAIEFDDDGLPIQKLALVTFRHDGGLDPTKNKTPMSRKETRGIARRTMRMNRERKRRLRNLDNVLENLGYSVPEGPEPETYEAWTSRALLASIKLASADELNEHLVRAVRHMARHRGWANPWWSLDQLEKASQEPSETFEIILARARELFGEKVPANPTLGMLGALAANNEVLLRPRDEKKRKTGYVRGTPLMFAQVRQGDQLAELRRICEVQGIEDQYEALRLGVFDHKHPYVPKERVGKDPLNPSTNRTIRASLEFQEFRILDSVANLRVRIGSRAKRELTEAEYDAAVEFLMDYADKEQPSWADVAEKIGVPGNRLVAPVLEDVQQKTAPYDRSSAAFEKAMGKKTEARQWWESTDDDQLRSLLIAFLVDATNDTEEAAAEAGLSELYKSWPAEEREALSNIDFEKGRVAYSQETLSKLSEYMHEYRVGLHEARKAVFGVDDTWRPPLDKLEEPTGQPAVDRVLTILRRFVLDCERQWGRPRAITVEHTRTGLMGPTQRQKILNEQKKNRADNERIRDELRESGVDNPSRAEVRRHLIVQEQECQCLYCGTMITTTTSELDHIVPRAGGGSSRRENLAAVCRACNAKKKRELFYAWAGPVKSQETIERVRQLKAFKDSKKAKMFKNQIRRLNQTEADEPIDERSLASTSYAAVAVRERLEQHFNEGLALDDKSRVVLDVYAGAVTRESRRAGGIDERILLRGERDKNRFDVRHHAVDAAVMTLLNRSVALTLEQRSQLRRAFYEQGLDKLDRDQLKPEEDWRNFIGLGTSGSETPGTSESATPESMTDSQNGTDGYWMGEALKLAQKAWDEGEVPVGAILVRKGEVIGHGWNRSIGSHDPSAHAEIMAIREAGVRIGNYRMLDTVLYSTLEPCAMCAGALVHGRISRLVFGAENPKRGACGSVMDIARHPALNNQLQVDGGVMAAPCARLLSRFFRWRRRQKKAARDNSSGNSGSETPGTSESATPESGTSLASQEKFLEWKKVTTVLGDLLAEAIEDDSIAVVSPLRLRPQNGRVHKDTIAAVKKQTLGSAWSADAVKRIVDPEIYLAMKDALGKSKVLPEDSARTLELSDGRYLEADDEVLFFPKNAASILTPRGVAEIGGSIHHARLYSWLTKKGELKIGMLRVYGAEFPWLMRESGSHDVLRMPIHPGSQSFRDMQDTTRKAVESSEAVEFAWITQNDELEFEPEDYIAHGGKDELRQFLEFMPECRWRVDGFKKNYQIRIRPAMLSREQLPSDIQRRLESKTLTENESLLLKALDTGLVVAIGGLLPLGTLKVIRRNNLGFPRWRGNGNLPTSFEVRSSALRALGVEGSGGKRPAATKKAGQAKKKK

SEQ ID NO: 1400 - protein, 1369 aa, unidentified
MAPKKKRKVGGGGSSTDMKNYRIGVAVGDRSVGLAAIEFDDDGLPIQKLALVTFRHDGGLDPTKNKTPMSRKETRGIARRTMRMNRERKRRLRNLDNVLENLGYSVPEGPEPETYEAWTSRALLASIKLASADELNEHLVRAVRHMARHRGWANPWWSLDQLEKASQEPSETFEIILARARELFGEKVPANPTLGMLGALAANNEVLLRPRDEKKRKTGYVRGTPLMFAQVRQGDQLAELRRICEVQGIEDQYEALRLGVFDHKHPYVPKERVGKDPLNPSTNRTIRASLEFQEFRILDSVANLRVRIGSRAKRELTEAEYDAAVEFLMDYADKEQPSWADVAEKIGVPGNRLVAPVLEDVQQKTAPYDRSSAAFEKAMGKKTEARQWWESTDDDQLRSLLIAFLVDATNDTEEAAAEAGLSELYKSWPAEEREALSNIDFEKGRVAYSQETLSKLSEYMHEYRVGLHEARKAVFGVDDTWRPPLDKLEEPTGQPAVDRVLTILRRFVLDCERQWGRPRAITVEHTRTGLMGPTQRQKILNEQKKNRADNERIRDELRESGVDNPSRAEVRRHLIVQEQECQCLYCGTMITTTTSELDHIVPRAGGGSSRRENLAAVCRACNAKKKRELFYAWAGPVKSQETIERVRQLKAFKDSKKAKMFKNQIRRLNQTEADEPIDERSLASTSYAAVAVRERLEQHFNEGLALDDKSRVVLDVYAGAVTRESRRAGGIDERILLRGERDKNRFDVRHHAVDAAVMTLLNRSVALTLEQRSQLRRAFYEQGLDKLDRDQLKPEEDWRNFIGLGTSGSETPGTSESATPESMTDSQNGTDGYWMGEALKLAQKAWDEGEVPVGAILVRKGEVIGHGWNRSIGSHDPSAHAEIMAIREAGVRIGNYRMLDTVLYSTFEPCAMCAGALVHGRISRLVFGAENPKTGACGSVMDIARHPALNNQLQVDGGVMAAPCARLLSRFFRWRRRQKKAARDNSSGNSGSETPGTSESATPESGTSLASQEKFLEWKKVTTVLGDLLAEAIEDDSIAVVSPLRLRPQNGRVHKDTIAAVKKQTLGSAWSADAVKRIVDPEIYLAMKDALGKSKVLPEDSARTLELSDGRYLEADDEVLFFPKNAASILTPRGVAEIGGSIHHARLYSWLTKKGELKIGMLRVYGAEFPWLMRESGSHDVLRMPIHPGSQSFRDMQDTTRKAVESSEAVEFAWITQNDELEFEPEDYIAHGGKDELRQFLEFMPECRWRVDGFKKNYQIRIRPAMLSREQLPSDIQRRLESKTLTENESLLLKALDTGLVVAIGGLLPLGTLKVIRRNNLGFPRWRGNGNLPTSFEVRSSALRALGVEGSGGKRPAATKKAGQAKKKK

SEQ ID NO: 1401 - protein, 1369 aa, unidentified
MAPKKKRKVGGGGSSTDMKNYRIGVAVGDRSVGLAAIEFDDDGLPIQKLALVTFRHDGGLDPTKNKTPMSRKETRGIARRTMRMNRERKRRLRNLDNVLENLGYSVPEGPEPETYEAWTSRALLASIKLASADELNEHLVRAVRHMARHRGWANPWWSLDQLEKASQEPSETFEIILARARELFGEKVPANPTLGMLGALAANNEVLLRPRDEKKRKTGYVRGTPLMFAQVRQGDQLAELRRICEVQGIEDQYEALRLGVFDHKHPYVPKERVGKDPLNPSTNRTIRASLEFQEFRILDSVANLRVRIGSRAKRELTEAEYDAAVEFLMDYADKEQPSWADVAEKIGVPGNRLVAPVLEDVQQKTAPYDRSSAAFEKAMGKKTEARQWWESTDDDQLRSLLIAFLVDATNDTEEAAAEAGLSELYKSWPAEEREALSNIDFEKGRVAYSQETLSKLSEYMHEYRVGLHEARKAVFGVDDTWRPPLDKLEEPTGQPAVDRVLTILRRFVLDCERQWGRPRAITVEHTRTGLMGPTQRQKILNEQKKNRADNERIRDELRESGVDNPSRAEVRRHLIVQEQECQCLYCGTMITTTTSELDHIVPRAGGGSSRRENLAAVCRACNAKKKRELFYAWAGPVKSQETIERVRQLKAFKDSKKAKMFKNQIRRLNQTEADEPIDERSLASTSYAAVAVRERLEQHFNEGLALDDKSRVVLDVYAGAVTRESRRAGGIDERILLRGERDKNRFDVRHHAVDAAVMTLLNRSVALTLEQRSQLRRAFYEQGLDKLDRDQLKPEEDWRNFIGLGTSGSETPGTSESATPESMTDSQNGTDGYWMGEALKLAQKAWDEGEVPVGAILVRKGEVIGHGWNRSIGSHDPSAHAEIMAIREAGVRIGNYRMLDTVLYSTFEPCAMCAGALVHGRISRLVFGAENPKRGACGSVMDIARHPALNHQLQVDGGVMAAPCARLLSRFFRWRRRQKKAARDNSSGNSGSETPGTSESATPESGTSLASQEKFLEWKKVTTVLGDLLAEAIEDDSIAVVSPLRLRPQNGRVHKDTIAAVKKQTLGSAWSADAVKRIVDPEIYLAMKDALGKSKVLPEDSARTLELSDGRYLEADDEVLFFPKNAASILTPRGVAEIGGSIHHARLYSWLTKKGELKIGMLRVYGAEFPWLMRESGSHDVLRMPIHPGSQSFRDMQDTTRKAVESSEAVEFAWITQNDELEFEPEDYIAHGGKDELRQFLEFMPECRWRVDGFKKNYQIRIRPAMLSREQLPSDIQRRLESKTLTENESLLLKALDTGLVVAIGGLLPLGTLKVIRRNNLGFPRWRGNGNLPTSFEVRSSALRALGVEGSGGKRPAATKKAGQAKKKK

SEQ ID NO: 1402 - protein, 1369 aa, unidentified
MAPKKKRKVGGGGSSTDMKNYRIGVAVGDRSVGLAAIEFDDDGLPIQKLALVTFRHDGGLDPTKNKTPMSRKETRGIARRTMRMNRERKRRLRNLDNVLENLGYSVPEGPEPETYEAWTSRALLASIKLASADELNEHLVRAVRHMARHRGWANPWWSLDQLEKASQEPSETFEIILARARELFGEKVPANPTLGMLGALAANNEVLLRPRDEKKRKTGYVRGTPLMFAQVRQGDQLAELRRICEVQGIEDQYEALRLGVFDHKHPYVPKERVGKDPLNPSTNRTIRASLEFQEFRILDSVANLRVRIGSRAKRELTEAEYDAAVEFLMDYADKEQPSWADVAEKIGVPGNRLVAPVLEDVQQKTAPYDRSSAAFEKAMGKKTEARQWWESTDDDQLRSLLIAFLVDATNDTEEAAAEAGLSELYKSWPAEEREALSNIDFEKGRVAYSQETLSKLSEYMHEYRVGLHEARKAVFGVDDTWRPPLDKLEEPTGQPAVDRVLTILRRFVLDCERQWGRPRAITVEHTRTGLMGPTQRQKILNEQKKNRADNERIRDELRESGVDNPSRAEVRRHLIVQEQECQCLYCGTMITTTTSELDHIVPRAGGGSSRRENLAAVCRACNAKKKRELFYAWAGPVKSQETIERVRQLKAFKDSKKAKMFKNQIRRLNQTEADEPIDERSLASTSYAAVAVRERLEQHFNEGLALDDKSRVVLDVYAGAVTRESRRAGGIDERILLRGERDKNRFDVRHHAVDAAVMTLLNRSVALTLEQRSQLRRAFYEQGLDKLDRDQLKPEEDWRNFIGLGTSGSETPGTSESATPESMTDSQNGTDGYWMGEALKLAQKAWDEGEVPVGAILVRKGEVIGHGWNRSIGSHDPSAHAEIMAIREAGVRIGNYRMLDTVLYSTFEPCAMCAGALVHGRISRLVFGAENPKRGACGSVMDIARHPALNNQLQVDGGVMAAPCARLLSDFFRWRRRQKKAARDNSSGNSGSETPGTSESATPESGTSLASQEKFLEWKKVTTVLGDLLAEAIEDDSIAVVSPLRLRPQNGRVHKDTIAAVKKQTLGSAWSADAVKRIVDPEIYLAMKDALGKSKVLPEDSARTLELSDGRYLEADDEVLFFPKNAASILTPRGVAEIGGSIHHARLYSWLTKKGELKIGMLRVYGAEFPWLMRESGSHDVLRMPIHPGSQSFRDMQDTTRKAVESSEAVEFAWITQNDELEFEPEDYIAHGGKDELRQFLEFMPECRWRVDGFKKNYQIRIRPAMLSREQLPSDIQRRLESKTLTENESLLLKALDTGLVVAIGGLLPLGTLKVIRRNNLGFPRWRGNGNLPTSFEVRSSALRALGVEGSGGKRPAATKKAGQAKKKK

SEQ ID NO: 1403 - protein, 1369 aa, unidentified
MAPKKKRKVGGGGSSTDMKNYRIGVAVGDRSVGLAAIEFDDDGLPIQKLALVTFRHDGGLDPTKNKTPMSRKETRGIARRTMRMNRERKRRLRNLDNVLENLGYSVPEGPEPETYEAWTSRALLASIKLASADELNEHLVRAVRHMARHRGWANPWWSLDQLEKASQEPSETFEIILARARELFGEKVPANPTLGMLGALAANNEVLLRPRDEKKRKTGYVRGTPLMFAQVRQGDQLAELRRICEVQGIEDQYEALRLGVFDHKHPYVPKERVGKDPLNPSTNRTIRASLEFQEFRILDSVANLRVRIGSRAKRELTEAEYDAAVEFLMDYADKEQPSWADVAEKIGVPGNRLVAPVLEDVQQKTAPYDRSSAAFEKAMGKKTEARQWWESTDDDQLRSLLIAFLVDATNDTEEAAAEAGLSELYKSWPAEEREALSNIDFEKGRVAYSQETLSKLSEYMHEYRVGLHEARKAVFGVDDTWRPPLDKLEEPTGQPAVDRVLTILRRFVLDCERQWGRPRAITVEHTRTGLMGPTQRQKILNEQKKNRADNERIRDELRESGVDNPSRAEVRRHLIVQEQECQCLYCGTMITTTTSELDHIVPRAGGGSSRRENLAAVCRACNAKKKRELFYAWAGPVKSQETIERVRQLKAFKDSKKAKMFKNQIRRLNQTEADEPIDERSLASTSYAAVAVRERLEQHFNEGLALDDKSRVVLDVYAGAVTRESRRAGGIDERILLRGERDKNRFDVRHHAVDAAVMTLLNRSVALTLEQRSQLRRAFYEQGLDKLDRDQLKPEEDWRNFIGLGTSGSETPGTSESATPESMTDSQNGTDGYWMGEALKLAQKAWDEGEVPVGAILVRKGEVIGHGWNRSIGSHDPSAHAEIMAIREAGVRIGNYRMLDTVLYSTFEPCAMCAGALVHGRISRLVFGAENPKRGACGSVMDIARHPALNNQLQVDGGVMAAPCARLLSRFFRWRRAQKKAARDNSSGNSGSETPGTSESATPESGTSLASQEKFLEWKKVTTVLGDLLAEAIEDDSIAVVSPLRLRPQNGRVHKDTIAAVKKQTLGSAWSADAVKRIVDPEIYLAMKDALGKSKVLPEDSARTLELSDGRYLEADDEVLFFPKNAASILTPRGVAEIGGSIHHARLYSWLTKKGELKIGMLRVYGAEFPWLMRESGSHDVLRMPIHPGSQSFRDMQDTTRKAVESSEAVEFAWITQNDELEFEPEDYIAHGGKDELRQFLEFMPECRWRVDGFKKNYQIRIRPAMLSREQLPSDIQRRLESKTLTENESLLLKALDTGLVVAIGGLLPLGTLKVIRRNNLGFPRWRGNGNLPTSFEVRSSALRALGVEGSGGKRPAATKKAGQAKKKK

SEQ ID NO: 1404 - protein, 1369 aa, unidentified
MAPKKKRKVGGGGSSTDMKNYRIGVAVGDRSVGLAAIEFDDDGLPIQKLALVTFRHDGGLDPTKNKTPMSRKETRGIARRTMRMNRERKRRLRNLDNVLENLGYSVPEGPEPETYEAWTSRALLASIKLASADELNEHLVRAVRHMARHRGWANPWWSLDQLEKASQEPSETFEIILARARELFGEKVPANPTLGMLGALAANNEVLLRPRDEKKRKTGYVRGTPLMFAQVRQGDQLAELRRICEVQGIEDQYEALRLGVFDHKHPYVPKERVGKDPLNPSTNRTIRASLEFQEFRILDSVANLRVRIGSRAKRELTEAEYDAAVEFLMDYADKEQPSWADVAEKIGVPGNRLVAPVLEDVQQKTAPYDRSSAAFEKAMGKKTEARQWWESTDDDQLRSLLIAFLVDATNDTEEAAAEAGLSELYKSWPAEEREALSNIDFEKGRVAYSQETLSKLSEYMHEYRVGLHEARKAVFGVDDTWRPPLDKLEEPTGQPAVDRVLTILRRFVLDCERQWGRPRAITVEHTRTGLMGPTQRQKILNEQKKNRADNERIRDELRESGVDNPSRAEVRRHLIVQEQECQCLYCGTMITTTTSELDHIVPRAGGGSSRRENLAAVCRACNAKKKRELFYAWAGPVKSQETIERVRQLKAFKDSKKAKMFKNQIRRLNQTEADEPIDERSLASTSYAAVAVRERLEQHFNEGLALDDKSRVVLDVYAGAVTRESRRAGGIDERILLRGERDKNRFDVRHHAVDAAVMTLLNRSVALTLEQRSQLRRAFYEQGLDKLDRDQLKPEEDWRNFIGLGTSGSETPGTSESATPESMTDSQNDTDEYWMGEALKLAQKAWDEGEVPVGAILVRKGEVIGHGWNRSIGSHDPSAHAEIMAIREAGVRIGNYRMLDTVLYVTFEPCAMCAGALVHGRISRLVFGAENPKRGACGSVMDIARHPALNNQLQVDGGVMAAPCARLLSRFFRWRRRQKKAARDNSSGNSGSETPGTSESATPESGTSLASQEKFLEWKKVTTVLGDLLAEAIEDDSIAVVSPLRLRPQNGRVHKDTIAAVKKQTLGSAWSADAVKRIVDPEIYLAMKDALGKSKVLPEDSARTLELSDGRYLEADDEVLFFPKNAASILTPRGVAEIGGSIHHARLYSWLTKKGELKIGMLRVYGAEFPWLMRESGSHDVLRMPIHPGSQSFRDMQDTTRKAVESSEAVEFAWITQNDELEFEPEDYIAHGGKDELRQFLEFMPECRWRVDGFKKNYQIRIRPAMLSREQLPSDIQRRLESKTLTENESLLLKALDTGLVVAIGGLLPLGTLKVIRRNNLGFPRWRGNGNLPTSFEVRSSALRALGVEGSGGKRPAATKKAGQAKKKK

SEQ ID NO: 1405 - protein, 1369 aa, unidentified
MAPKKKRKVGGGGSSTDMKNYRIGVAVGDRSVGLAAIEFDDDGLPIQKLALVTFRHDGGLDPTKNKTPMSRKETRGIARRTMRMNRERKRRLRNLDNVLENLGYSVPEGPEPETYEAWTSRALLASIKLASADELNEHLVRAVRHMARHRGWANPWWSLDQLEKASQEPSETFEIILARARELFGEKVPANPTLGMLGALAANNEVLLRPRDEKKRKTGYVRGTPLMFAQVRQGDQLAELRRICEVQGIEDQYEALRLGVFDHKHPYVPKERVGKDPLNPSTNRTIRASLEFQEFRILDSVANLRVRIGSRAKRELTEAEYDAAVEFLMDYADKEQPSWADVAEKIGVPGNRLVAPVLEDVQQKTAPYDRSSAAFEKAMGKKTEARQWWESTDDDQLRSLLIAFLVDATNDTEEAAAEAGLSELYKSWPAEEREALSNIDFEKGRVAYSQETLSKLSEYMHEYRVGLHEARKAVFGVDDTWRPPLDKLEEPTGQPAVDRVLTILRRFVLDCERQWGRPRAITVEHTRTGLMGPTQRQKILNEQKKNRADNERIRDELRESGVDNPSRAEVRRHLIVQEQECQCLYCGTMITTTTSELDHIVPRAGGGSSRRENLAAVCRACNAKKKRELFYAWAGPVKSQETIERVRQLKAFKDSKKAKMFKNQIRRLNQTEADEPIDERSLASTSYAAVAVRERLEQHFNEGLALDDKSRVVLDVYAGAVTRESRRAGGIDERILLRGERDKNRFDVRHHAVDAAVMTLLNRSVALTLEQRSQLRRAFYEQGLDKLDRDQLKPEEDWRNFIGLGTSGSETPGTSESATPESMTDSQNDTDEYWMGEALKLAQKAWDEGEVPVGAILVRKGEVIGHGWNRSIGSHDPSAHAEIMAIREAGVRIGNYRMLDTVLYSTLEPCAMCAGALVHGRISRLVFGAENPKRGACGSVMDIARHPALNNQLQVDGGVMAAPCARLLSRFFRWRRRQKKAARDNSSGNSGSETPGTSESATPESGTSLASQEKFLEWKKVTTVLGDLLAEAIEDDSIAVVSPLRLRPQNGRVHKDTIAAVKKQTLGSAWSADAVKRIVDPEIYLAMKDALGKSKVLPEDSARTLELSDGRYLEADDEVLFFPKNAASILTPRGVAEIGGSIHHARLYSWLTKKGELKIGMLRVYGAEFPWLMRESGSHDVLRMPIHPGSQSFRDMQDTTRKAVESSEAVEFAWITQNDELEFEPEDYIAHGGKDELRQFLEFMPECRWRVDGFKKNYQIRIRPAMLSREQLPSDIQRRLESKTLTENESLLLKALDTGLVVAIGGLLPLGTLKVIRRNNLGFPRWRGNGNLPTSFEVRSSALRALGVEGSGGKRPAATKKAGQAKKKK

SEQ ID NO: 1406 - protein, 1369 aa, unidentified; identical to SEQ ID NO: 1400

SEQ ID NO: 1407 - protein, 1369 aa, unidentified; identical to SEQ ID NO: 1401

SEQ ID NO: 1408 - protein, 1369 aa, unidentified; identical to SEQ ID NO: 1402

SEQ ID NO: 1409 - protein, 1369 aa, unidentified; identical to SEQ ID NO: 1403

SEQ ID NO: 1410 - protein, 1369 aa, unidentified; identical to SEQ ID NO: 1157

SEQ ID NO: 1411 - protein, 1601 aa, unidentified
MAPKKKRKVGGGGSSTDMKNYRIGVAVGDRSVGLAAIEFDDDGLPIQKLALVTFRHDGGLDPTKNKTPMSRKETRGIARRTMRMNRERKRRLRNLDNVLENLGYSVPEGPEPETYEAWTSRALLASIKLASADELNEHLVRAVRHMARHRGWANPWWSLDQLEKASQEPSETFEIILARARELFGEKVPANPTLGMLGALAANNEVLLRPRDEKKRKTGYVRGTPLMFAQVRQGDQLAELRRICEVQGIEDQYEALRLGVFDHKHPYVPKERVGKDPLNPSTNRTIRASLEFQEFRILDSVANLRVRIGSRAKRELTEAEYDAAVEFLMDYADKEQPSWADVAEKIGVPGNRLVAPVLEDVQQKTAPYDRSSAAFEKAMGKKTEARQWWESTDDDQLRSLLIAFLVDATNDTEEAAAEAGLSELYKSWPAEEREALSNIDFEKGRVAYSQETLSKLSEYMHEYRVGLHEARKAVFGVDDTWRPPLDKLEEPTGQPAVDRVLTILRRFVLDCERQWGRPRAITVEHTRTGLMGPTQRQKILNEQKKNRADNERIRDELRESGVDNPSRAEVRRHLIVQEQECQCLYCGTMITTTTSELDHIVPRAGGGSSRRENLAAVCRACNAKKKRELFYAWAGPVKSQETIERVRQLKAFKDSKKAKMFKNQIRRLNQTEADEPIDERSLASTSYAAVAVRERLEQHFNEGLALDDKSRVVLDVYAGAVTRESRRAGGIDERILLRGERDKNRFDVRHHAVDAAVMTLLNRSVALTLEQRSQLRRAFYEQGLDKLDRDQLKPEEDWRNFIGLGTSGSETPGTSESATPESMTDSQNDTDEYWMGEALKLAQKAWDEGEVPVGAILVRKGEVIGHGWNRSIGSHDPSAHAEIMAIREAGVRIGNYRMLDTVLYVTLEPCAMCAGALVHGRISRLVFGAENPKTGACGSVMDIARHPALNHQLQVDGGVMAAPCARLLSDFFRWRRAQKKAARDNSSGNSGGSSGGSSGSETPGTSESATPESSGGSSGGSSGGSSGGSSGSETPGTSESATPESSGGSSGGSAMTDSQNDTDEYWMGEALKLAQKAWDEGEVPVGAILVRKGEVIGHGWNRSIGSHDPSAHAEIMAIREAGVRIGNYRMLDTVLYVTLEPCAMCAGALVHGRISRLVFGAENPKTGACGSVMDIARHPALNHQLQVDGGVMAAPCARLLSDFFRWRRAQKKAARDNSSGNSGSETPGTSESATPESGTSLASQEKFLEWKKVTTVLGDLLAEAIEDDSIAVVSPLRLRPQNGRVHKDTIAAVKKQTLGSAWSADAVKRIVDPEIYLAMKDALGKSKVLPEDSARTLELSDGRYLEADDEVLFFPKNAASILTPRGVAEIGGSIHHARLYSWLTKKGELKIGMLRVYGAEFPWLMRESGSHDVLRMPIHPGSQSFRDMQDTTRKAVESSEAVEFAWITQNDELEFEPEDYIAHGGKDELRQFLEFMPECRWRVDGFKKNYQIRIRPAMLSREQLPSDIQRRLESKTLTENESLLLKALDTGLVVAIGGLLPLGTLKVIRRNNLGFPRWRGNGNLPTSFEVRSSALRALGVEGSGGKRPAATKKAGQAKKKK

SEQ ID NO: 1412 - protein, 1369 aa, unidentified; identical to SEQ ID NO: 1365

SEQ ID NO: 1413 - protein, 1369 aa, unidentified; identical to SEQ ID NO: 1369

SEQ ID NO: 1414 - protein, 1601 aa, unidentified
MAPKKKRKVGGGGSSTDMKNYRIGVAVGDRSVGLAAIEFDDDGLPIQKLALVTFRHDGGLDPTKNKTPMSRKETRGIARRTMRMNRERKRRLRNLDNVLENLGYSVPEGPEPETYEAWTSRALLASIKLASADELNEHLVRAVRHMARHRGWANPWWSLDQLEKASQEPSETFEIILARARELFGEKVPANPTLGMLGALAANNEVLLRPRDEKKRKTGYVRGTPLMFAQVRQGDQLAELRRICEVQGIEDQYEALRLGVFDHKHPYVPKERVGKDPLNPSTNRTIRASLEFQEFRILDSVANLRVRIGSRAKRELTEAEYDAAVEFLMDYADKEQPSWADVAEKIGVPGNRLVAPVLEDVQQKTAPYDRSSAAFEKAMGKKTEARQWWESTDDDQLRSLLIAFLVDATNDTEEAAAEAGLSELYKSWPAEEREALSNIDFEKGRVAYSQETLSKLSEYMHEYRVGLHEARKAVFGVDDTWRPPLDKLEEPTGQPAVDRVLTILRRFVLDCERQWGRPRAITVEHTRTGLMGPTQRQKILNEQKKNRADNERIRDELRESGVDNPSRAEVRRHLIVQEQECQCLYCGTMITTTTSELDHIVPRAGGGSSRRENLAAVCRACNAKKKRELFYAWAGPVKSQETIERVRQLKAFKDSKKAKMFKNQIRRLNQTEADEPIDERSLASTSYAAVAVRERLEQHFNEGLALDDKSRVVLDVYAGAVTRESRRAGGIDERILLRGERDKNRFDVRHHAVDAAVMTLLNRSVALTLEQRSQLRRAFYEQGLDKLDRDQLKPEEDWRNFIGLGTSGSETPGTSESATPESMTDSQNDTDEYWMGEALKLAQKAWDEGEVPVGAILVRKGEVIGHGWNRSIGSHDPSAHAEIMAIREAGVRIGNYRMLDTVLYVTLEPCAMCAGALVHGRISRLVFGAENPKTGACGSVMDIARHPALNHQLQVDGGVMAAPCARLLSDFFRWRRAQKKAARDNSSGNSGGSSGGSSGSETPGTSESATPESSGGSSGGSSGGSSGGSSGSETPGTSESATPESSGGSSGGSAMTDSQNGTDGYWMGEALKLAQKAWDEGEVPVGAILVRKGEVIGHGWNRSIGSHDPSAHAEIMAIREAGVRIGNYRMLDTVLYVTLEPCAMCAGALVHGRISRLVFGAENPKTGACGSVMDIARHPALNHQLQVDGGVMAAPCARLLSDFFRWRRAQKKAARDNSSGNSGSETPGTSESATPESGTSLASQEKFLEWKKVTTVLGDLLAEAIEDDSIAVVSPLRLRPQNGRVHKDTIAAVKKQTLGSAWSADAVKRIVDPEIYLAMKDALGKSKVLPEDSARTLELSDGRYLEADDEVLFFPKNAASILTPRGVAEIGGSIHHARLYSWLTKKGELKIGMLRVYGAEFPWLMRESGSHDVLRMPIHPGSQSFRDMQDTTRKAVESSEAVEFAWITQNDELEFEPEDYIAHGGKDELRQFLEFMPECRWRVDGFKKNYQIRIRPAMLSREQLPSDIQRRLESKTLTENESLLLKALDTGLVVAIGGLLPLGTLKVIRRNNLGFPRWRGNGNLPTSFEVRSSALRALGVEGSGGKRPAATKKAGQAKKKK

SEQ ID NO: 1415 - protein, 1601 aa, unidentified
MAPKKKRKVGGGGSSTDMKNYRIGVAVGDRSVGLAAIEFDDDGLPIQKLALVTFRHDGGLDPTKNKTPMSRKETRGIARRTMRMNRERKRRLRNLDNVLENLGYSVPEGPEPETYEAWTSRALLASIKLASADELNEHLVRAVRHMARHRGWANPWWSLDQLEKASQEPSETFEIILARARELFGEKVPANPTLGMLGALAANNEVLLRPRDEKKRKTGYVRGTPLMFAQVRQGDQLAELRRICEVQGIEDQYEALRLGVFDHKHPYVPKERVGKDPLNPSTNRTIRASLEFQEFRILDSVANLRVRIGSRAKRELTEAEYDAAVEFLMDYADKEQPSWADVAEKIGVPGNRLVAPVLEDVQQKTAPYDRSSAAFEKAMGKKTEARQWWESTDDDQLRSLLIAFLVDATNDTEEAAAEAGLSELYKSWPAEEREALSNIDFEKGRVAYSQETLSKLSEYMHEYRVGLHEARKAVFGVDDTWRPPLDKLEEPTGQPAVDRVLTILRRFVLDCERQWGRPRAITVEHTRTGLMGPTQRQKILNEQKKNRADNERIRDELRESGVDNPSRAEVRRHLIVQEQECQCLYCGTMITTTTSELDHIVPRAGGGSSRRENLAAVCRACNAKKKRELFYAWAGPVKSQETIERVRQLKAFKDSKKAKMFKNQIRRLNQTEADEPIDERSLASTSYAAVAVRERLEQHFNEGLALDDKSRVVLDVYAGAVTRESRRAGGIDERILLRGERDKNRFDVRHHAVDAAVMTLLNRSVALTLEQRSQLRRAFYEQGLDKLDRDQLKPEEDWRNFIGLGTSGSETPGTSESATPESMTDSQNDTDEYWMGEALKLAQKAWDEGEVPVGAILVRKGEVIGHGWNRSIGSHDPSAHAEIMAIREAGVRIGNYRMLDTVLYVTLEPCAMCAGALVHGRISRLVFGAENPKTGACGSVMDIARHPALNHQLQVDGGVMAAPCARLLSDFFRWRRAQKKAARDNSSGNSGGSSGGSSGSETPGTSESATPESSGGSSGGSSGGSSGGSSGSETPGTSESATPESSGGSSGGSAMTDSQNDTDEYWMGEALKLAQKAWDEGEVPVGAILVRKGEVIGHGWNRSIGSHDPSAHAEIMAIREAGVRIGNYRMLDTVLYVTLEPCAMCAGALVHGRISRLVFGAENPKTGACGSVMDIARHPALNNQLQVDGGVMAAPCARLLSDFFRWRRAQKKAARDNSSGNSGSETPGTSESATPESGTSLASQEKFLEWKKVTTVLGDLLAEAIEDDSIAVVSPLRLRPQNGRVHKDTIAAVKKQTLGSAWSADAVKRIVDPEIYLAMKDALGKSKVLPEDSARTLELSDGRYLEADDEVLFFPKNAASILTPRGVAEIGGSIHHARLYSWLTKKGELKIGMLRVYGAEFPWLMRESGSHDVLRMPIHPGSQSFRDMQDTTRKAVESSEAVEFAWITQNDELEFEPEDYIAHGGKDELRQFLEFMPECRWRVDGFKKNYQIRIRPAMLSREQLPSDIQRRLESKTLTENESLLLKALDTGLVVAIGGLLPLGTLKVIRRNNLGFPRWRGNGNLPTSFEVRSSALRALGVEGSGGKRPAATKKAGQAKKKK

SEQ ID NO: 1416 - protein, 123 aa, unidentified
GUUACAGUUAAGAAAUUAAUUGUAAAACGCCUAUACAGUGAAGGGAUAUACGCUUGGGUUUGUCCAGCCUGAGCCUCUAUGCCAGAAAUGGCGCCUUCAUCGUGGGUUAGGACAUUUAAUUUU

SEQ ID NO: 1417 - protein, 123 aa, unidentified; identical to SEQ ID NO: 1416

SEQ ID NO: 1418 - protein, 89 aa, unidentified
AGUUGAGAAUCGAAAGAUUCUUAAUAAGGCAUCCUUCCGAUGCUGACUUCUCACCGUCCGUUUUCCAAUAGGAGCGGGCGGUAUGUUUU

SEQ ID NO: 1419 - protein, 20 aa, unidentified
GAACACAAAGCAUAGACUGC

SEQ ID NO: 1420 - protein, 20 aa, unidentified
GGGAAAGACCCAGCAUCCGU

SEQ ID NO: 1421 - protein, 21 aa, unidentified
ACAGACAAAACUGUGCUAGAC

SEQ ID NO: 1422 - DNA, 6863 bp, synthetic construct
  source 1..6863: mol_type = other DNA
ctgcttgtgtgttggaggtcgctgagtagtgcgcgagcaaaatttaagctacaacaaggcaaggcttgaccgacaattgcatgaagaatctgcttagggttaggcgttttgcgctgcttcgcgatgtacgggccagatatacgcgttgacattgattattgactagttattaatagtaatcaattacggggtcattagttcatagcccatatatggagttccgcgttacataacttacggtaaatggcccgcctggctgaccgcccaacgacccccgcccattgacgtcaataatgacgtatgttcccatagtaacgccaatagggactttccattgacgtcaatgggtggagtatttacggtaaactgcccacttggcagtacatcaagtgtatcatatgccaagtacgccccctattgacgtcaatgacggtaaatggcccgcctggcattatgcccagtacatgaccttatgggactttcctacttggcagtacatctacgtattagtcatcgctattaccatggtgatgcggttttggcagtacatcaatgggcgtggatagcggtttgactcacggggatttccaagtctccaccccattgacgtcaatgggagtttgttttggcaccaaaatcaacgggactttccaaaatgtcgtaacaactccgccccattgacgcaaatgggcggtaggcgtgtacggtgggaggtctatataagcagagctggtttagtgaaccgtcagatccgctagagatccgcggccgcgatgaccgacagccagaacgacaccgacgagtactggatgggcgaagccctgaagctggcccagaaagcttgggatgaaggcgaagtgcctgtgggcgccattcttgtgcgaaagggcgaagtgatcggccacggctggaatagatccatcggcagccacgatccaagcgctcacgccgagatcatggccattagagaggccggcgtccggatcggcaactacagaatgctggacaccgtgctgtacgtgaccctggaaccttgcgctatgtgtgctggcgctctggtgcacggcagaatcagcagactggtgtttggcgccgagaatcctaagaccggcgcctgtggaagcgtgatggatatcgccagacatcccgctctgaaccaccagctgcaagtggatggcggagtgatggctgccccttgtgctagactgctgagcgacttcttcaggtggcggagagcccagaagaaggccgccagagataacagcagcggcaactcaggcgggtcttccggcggcagtagtgggagcgaaacaccgggcacaagtgagagcgcaacaccggaatcatctggcggttcaagcggcggatccgcgatgaccgactctcaaaatgacactgatgaatactggatgggtgaggctcttaaactggcgcagaaagcctgggacgaaggtgaagtgcctgttggcgccatcctggtccggaaaggggaagtgattgggcacgggtggaatcgaagcattgggtcacacgatccatccgctcatgcagaaattatggcgatcagagaggccggagttcgaatcggaaattatagaatgcttgataccgtgctgtacgtgaccttagagccctgcgcaatgtgcgcaggtgccctggttcatggaagaattagccggctggtgtttggagcagagaaccccaagactggggcttgtggatctgttatggacattgcaaggcatccagccctgaaccatcaactccaagttgatggcggagtcatggctgccccctgcgcccgcttattgtccgacttcttccgctggcgccgtgcgcaaaagaaagctgccagagataactctagcggaaatggtacctcaggcgggtcttccggcggcagtagtgggagcgaaacaccgggcacaagtgagagcgcaacaccggaatcatctggcggttcaagcggcggatccatggaacgcgaattggtcttgggaattgcgtatggcggaaagtacactggtctggccgtcgtcgataggagacataaccaagtgctctacgcaaatagactgaagatgagggatgatgtcgccggcattcttaaagaccgccggaagcaaaggggcatcaggcgcaccgcccaaacaaagaagaagcgtttgcgagaacttaagaattatctcaaaagtataggttacaatgagtcaaccgctacttttgaaacggtttactcactggctcacaagaggggctatgactatgctgatatgcccgaggaaaagactagtgaagaaattgaagcaatggacgtggaagagcggaaacaatgggaaaaggagaaacaagagtgggaagagactaaacgaaactctagacatcgtaaagaagtcgtgaaggatgtccacaaagctatgattgaaggcagggctactgaggaacaaattaaaagagtggaacggatatttaataaacaatacagacccaagcgattcaataatcgcatcctgacaaaatgcaaggtcgaagactgcggagtcaacacccctttgaggaagaatgttagggatctcctgatagaaaatattgtgaggttcttcccaatagaacaatctgaaaaggataacttgaaggacgccgtgttggataagaatagaagggaagaagtcaagtccttctttaggaaacataaaaccgatgagcatatacgcaaacaggtgtatgatatagccgataacaagctctctggcaggacagtcttttgcaaggagcacattctggaacacacagaacattctaaggaagagaggaaagtattcagactcgctccgagtcttaagaccaaaatagagaatgtccttgccgtaattaaagatgaaatcctgcctaagttcaccgtcaataaagtcgtgatggagtctaacaatttcgacatcgctgccaaaactcaaggcaagaaacggctcgccaaagaagagtatggtaagggaccacgtgaaggcaaagaaaccaggaaagaagctctcctgcgggagactgatggcagatgcatatattgtgggaagtcaatagatatctccaatgctcatgacgaccatatctttcctcgaaaggccggcggactgaacatcttcgcaaatcttgtagcatgctgtgccgtgtgtaatgagaataagaaagggcggacacctctggaatcaggtattagcccaaagccagagatcatcgctttcatgaagaatgatctcaagaagaagatccttgaagacgcccgaaacataaacacggtggatttcaataagtacatgtcacatgccagcattggctggagatatatgagagaccgacttagggaatctgccgggaataagaagctcccgattgagaggcaaagcgggatctatacggcatactttcggagatggtggggattcaagaaggagcggggcaatacactccaccatgccttggatgctgttatcctggcgtcccggaaaggatatagcgatgacgggttggttgacatgacattgaaacctaaatacaacaaaggtggagagttcgatccagaaaagcacctgccagaacctattgagttcaaaatggacaaaggttccaggggatctgcacttcatgatagaaaccccttgtcctataagaagggaattattactcgtaggttcatggtcactgaaatcgagtgcgggaaagaggatgacgtgatctcagaaacttacagagagaaactcaaagaggcattcaagcgctttgataccaagaaaggaaaatgtctgaccgacaaggaagccaaagaggccggattctgcatcaagaagaatgagctggtgatgagtcttaaatgttccatcaaaggaacaggccctgggcaaatgattcgcattaacaacaatgtattcaaaactaacgttcataatgttggggttgatgtttatctcgacgagaaaggcaagaagaaagcctacgaaagaaagaacccgcggttgagcaaacatttcattgagccaccaccacagcctaatggaagggttagcttcactctcaaacggagagacatggtaactgtcgagggagaagatgcaatttataggatcaagaagctcggtacatctcccactatagaggccgtcgtaggatcagacggaaagacccggactgtgtcagcaacaaaacttaccaaggctaacagtgctgagctcgaggagggagctgataagcgcaccgccgatggttccgagttcgaaagccccaagaagaagaggaaagtctaaccatcatcaccatcaccattgagtttaaacccgctgatcagcctcgactgtgccttctagttgccagccatctgttgtttgcccctcccccgtgccttccttgaccctggaaggtgccactcccactgtcctttcctaataaaatgaggaaattgcatcgcattgtctgagtaggtgtcattctattctggggggtggggtggggcaggacagcaagggggaggattgggaagacaatagcaggcatgctggggatgcggtgggctctatggcttctgaggcggaaagaaccagctggggctcgataccgtcgacctctagctagagcttggcgtaatcatggtcatagctgtttcctgtgtgaaattgttatccgctcacaattccacacaacatacgagccggaagcataaagtgtaaagcctagggtgcctaatgagtgagctaactcacattaattgcgttgcgctcactgcccgctttccagtcgggaaacctgtcgtgccagctgcattaatgaatcggccaacgcgcggggagaggcggtttgcgtattgggcgctcttccgcttcctcgctcactgactcgctgcgctcggtcgttcggctgcggcgagcggtatcagctcactcaaaggcggtaatacggttatccacagaatcaggggataacgcaggaaagaacatgtgagcaaaaggccagcaaaaggccaggaaccgtaaaaaggccgcgttgctggcgtttttccataggctccgcccccctgacgagcatcacaaaaatcgacgctcaagtcagaggtggcgaaacccgacaggactataaagataccaggcgtttccccctggaagctccctcgtgcgctctcctgttccgaccctgccgcttaccggatacctgtccgcctttctcccttcgggaagcgtggcgctttctcatagctcacgctgtaggtatctcagttcggtgtaggtcgttcgctccaagctgggctgtgtgcacgaaccccccgttcagcccgaccgctgcgccttatccggtaactatcgtcttgagtccaacccggtaagacacgacttatcgccactggcagcagccactggtaacaggattagcagagcgaggtatgtaggcggtgctacagagttcttgaagtggtggcctaactacggctacactagaagaacagtatttggtatctgcgctctgctgaagccagttaccttcggaaaaagagttggtagctcttgatccggcaaacaaaccaccgctggtagcggtggtttttttgtttgcaagcagcagattacgcgcagaaaaaaaggatctcaagaagatcctttgatcttttctacggggtctgacgctcagtggaacgaaaactcacgttaagggattttggtcatgagattatcaaaaaggatcttcacctagatccttttaaattaaaaatgaagttttaaatcaatctaaagtatatatgagtaaacttggtctgacagttaccaatgcttaatcagtgaggcacctatctcagcgatctgtctatttcgttcatccatagttgcctgactccccgtcgtgtagataactacgatacgggagggcttaccatctggccccagtgctgcaatgataccgcgagacccacgctcaccggctccagatttatcagcaataaaccagccagccggaagggccgagcgcagaagtggtcctgcaactttatccgcctccatccagtctattaattgttgccgggaagctagagtaagtagttcgccagttaatagtttgcgcaacgttgttgccattgctacaggcatcgtggtgtcacgctcgtcgtttggtatggcttcattcagctccggttcccaacgatcaaggcgagttacatgatcccccatgttgtgcaaaaaagcggttagctccttcggtcctccgatcgttgtcagaagtaagttggccgcagtgttatcactcatggttatggcagcactgcataattctcttactgtcatgccatccgtaagatgcttttctgtgactggtgagtactcaaccaagtcattctgagaatagtgtatgcggcgaccgagttgctcttgcccggcgtcaatacgggataataccgcgccacatagcagaactttaaaagtgctcatcattggaaaacgttcttcggggcgaaaactctcaaggatcttaccgctgttgagatccagttcgatgtaacccactcgtgcacccaactgatcttcagcatcttttactttcaccagcgtttctgggtgagcaaaaacaggaaggcaaaatgccgcaaaaaagggaataagggcgacacggaaatgttgaatactcatactcttcctttttcaatattattgaagcatttatcagggttattgtctcatgagcggatacatatttgaatgtatttagaaaaataaacaaataggggttccgcgcacatttccccgaaaagtgccacctgacgtcgaccctagggtcgactctcagtacaatctgctctgatgccgaagcttcatagttaagccagtatctgctcc

SEQ ID NO: 1423 - DNA, 7993 bp, synthetic construct
  source 1..7993: mol_type = other DNA
ctgcttgtgtgttggaggtcgctgagtagtgcgcgagcaaaatttaagctacaacaaggcaaggcttgaccgacaattgcatgaagaatctgcttagggttaggcgttttgcgctgcttcgcgatgtacgggccagatatacgcgttgacattgattattgactagttattaatagtaatcaattacggggtcattagttcatagcccatatatggagttccgcgttacataacttacggtaaatggcccgcctggctgaccgcccaacgacccccgcccattgacgtcaataatgacgtatgttcccatagtaacgccaatagggactttccattgacgtcaatgggtggagtatttacggtaaactgcccacttggcagtacatcaagtgtatcatatgccaagtacgccccctattgacgtcaatgacggtaaatggcccgcctggcattatgcccagtacatgaccttatgggactttcctacttggcagtacatctacgtattagtcatcgctattaccatggtgatgcggttttggcagtacatcaatgggcgtggatagcggtttgactcacggggatttccaagtctccaccccattgacgtcaatgggagtttgttttggcaccaaaatcaacgggactttccaaaatgtcgtaacaactccgccccattgacgcaaatgggcggtaggcgtgtacggtgggaggtctatataagcagagctggtttagtgaaccgtcagatccgctagagatccgcggccgcgatggcccccaagaagaagagaaaagtcggcggaggcggcagcagcaccgacatgaagaactacagaatcggcgtggccgtgggcgacagaagcgttggactggctgccatcgagttcgacgatgacggactgcccatccagaagctggccctggtcacattcagacacgacggtggactggaccccaccaagaacaagacccctatgagcagaaaagagacacggggaatcgccagacggaccatgagaatgaacagagagcgcaagagaaggctgaggaacctggacaacgtgctggaaaacctgggctactctgtgcctgagggccctgagcctgagacatacgaggcctggacatctagagccctgctggcctctatcaaactggcctctgccgacgagctgaacgaacaccttgtcagagccgtgcggcacatggccagacatagaggatgggccaatccttggtggtccctggaccagctggaaaaggccagccaagagcctagcgagacattcgagatcatcctggccagagccagagagctgttcggcgagaaggtgcccgctaatcctacactgggaatgctgggagccctggccgctaacaatgaggtgctgctgaggcccagggacgagaagaagagaaagaccggatacgtgcggggcacccctctgatgtttgctcaagttcgacagggcgatcagctggccgagctgcggagaatttgtgaagtgcagggcatcgaggaccagtacgaggctctgagactgggcgtgttcgaccacaagcacccctacgtgcccaaagaaagagtgggcaaagaccctctgaaccccagcaccaacagaaccatcagagccagcctggaatttcaagagttccgcatcctggacagcgtggccaatctgagagtgcggatcggcagcagagccaagagggaactgacagaggccgagtatgatgccgccgtggaattcctgatggactacgccgacaaagagcagcctagctgggccgatgtggccgagaaaattggcgtgcccggcaacagactggtggcccctgttctggaagatgtgcagcagaaaacagccccttacgacagaagcagcgccgcctttgagaaggccatgggcaagaaaaccgaggccagacagtggtgggagtccaccgatgatgaccagctgagaagcctgctgattgccttcctggtggacgccaccaacgacacagaagaagccgctgctgaagccggcctgagcgagctgtataagtcttggcctgccgaggaaagagaggccctgtccaacatcgacttcgagaagggcagagtggcctacagccaagaaaccctgagcaagctgagcgagtacatgcacgagtacagagtgggactgcacgaggctagaaaggccgtgttcggagtggatgatacctggcggcctcctctggataagctggaagaacctacaggacagcctgccgtggacagagtgctgaccatcctgagaagattcgtgctggactgcgagcggcaatggggcagacctagagccatcaccgtggaacacacacggacaggcctgatgggcccaacacagagacagaagatcctgaacgagcagaagaagaaccgggccgacaacgagagaatccgggatgagctgagagaatctggcgtggacaacccctccagagccgaagttcggagacacctgatcgtgcaagagcaagagtgccagtgcctgtactgcggcaccatgatcaccaccaccacaagcgagctggaccacatcgttcctagagccggtggcggcagcagcagaagggaaaatctggccgctgtgtgcagagcctgcaacgccaagaagaaacgcgagctgttctacgcctgggctggcccagtgaagtcccaagagacaatcgagagagtcagacagctgaaggcctttaaggacagcaagaaagccaagatgttcaagaaccagatccgccggctgaaccagaccgaggccgatgagcctatcgacgaaagaagcctggccagcacatcttacgccgctgtggccgttagagagcggctggaacagcacttcaacgaaggcctggcactggacgacaagtccagagtggtgctggatgtgtatgccggcgctgtgaccagagagtctcgtagagctggcggcatcgacgagcggattctgctgagaggcgagcgggacaagaacagattcgatgtgcggcatcacgccgtggacgctgctgttatgaccctgctgaacagatccgtggctctgaccctggaacagagatcacagctgaggcgggccttctacgagcaaggactggacaaactggacagggatcagctgaagcccgaagaggactggcggaacttcatcggactgggtacctcggggagtgaaacacccggcacatccgaaagtgcgacacctgaatctatgaccgactctcaaaatgacactgatgaatactggatgggtgaggctcttaaactggcgcagaaagcctgggacgaaggtgaagtgcctgttggcgccatcctggtccggaaaggggaagtgattgggcacgggtggaatcgaagcattgggtcacacgatccatccgctcatgcagaaattatggcgatcagagaggccggagttcgaatcggaaattatagaatgcttgataccgtgctgtacgtgaccttagagccctgcgcaatgtgcgcaggtgccctggttcatggaagaattagccggctggtgtttggagcagaggaccccaagactggggcttgtggatctgttatggacattgcaaggcatccagccctgaaccatcaactccaagttgatggcggagtcatggctgccccctgcgcccgcttattgtccgacttcttccgctggcgccgtgcgcaaaagaaagctgccagagataactctagcggaaatagcggatctgagacacctggcacaagcgagtctgccacacctgagtctggtaccagcctggcctctcaagagaagttcctggaatggaagaaagtgaccaccgtgctgggcgacctgctggctgaagccatcgaggatgattctatcgccgtggtgtcccctctgaggctgaggccacaaaatggcagagtgcacaaggacacaatcgccgccgtgaagaagcagacactgggatctgcttggagcgccgacgccgtgaaaagaatcgtggaccccgagatctacctggctatgaaggatgccctgggcaagtccaaggtgctgccagaggatagcgcccggacactggaactgtccgatggcagatacctggaagccgacgacgaggtgctgttcttcccaaagaacgccgccagcatcctgacacctagaggcgtggcagagatcggcggctctattcaccatgccagactgtatagctggctgaccaagaagggcgagctgaagatcggcatgctgagagtgtacggcgccgagtttccctggctgatgagagagtctggatctcacgacgtgctgcggatgcctattcaccctggcagccagagcttccgggacatgcaggataccaccagaaaagccgtggaaagcagcgaggctgtggaattcgcctggatcacccagaacgatgagctggaattcgagcccgaggactacattgcccacggcggaaaggacgaactgcggcagtttctggaattcatgcctgagtgccgttggagagtggacggcttcaagaagaattaccagatcagaatcaggcccgccatgctgagcagagagcagctgcctagcgacatccagcggagactggaaagcaagaccctgaccgagaacgagtccctgctgctgaaagccctggatacaggactggtggtggccatcggaggactgctgcctctgggaaccctgaaagtgatccggcggaacaatctgggcttccccaggtggcgcggaaacggaaatctgcccaccagctttgaagtgcggagcagcgctctgagagccctgggagttgaaggatctggcggaaaaagacctgccgccacaaagaaagccggacaggccaagaaaaagaagtgaggatcccatcatcaccatcaccattgagtttaaacccgctgatcagcctcgactgtgccttctagttgccagccatctgttgtttgcccctcccccgtgccttccttgaccctggaaggtgccactcccactgtcctttcctaataaaatgaggaaattgcatcgcattgtctgagtaggtgtcattctattctggggggtggggtggggcaggacagcaagggggaggattgggaagacaatagcaggcatgctggggatgcggtgggctctatggcttctgaggcggaaagaaccagctggggctcgataccgtcgacctctagctagagcttggcgtaatcatggtcatagctgtttcctgtgtgaaattgttatccgctcacaattccacacaacatacgagccggaagcataaagtgtaaagcctagggtgcctaatgagtgagctaactcacattaattgcgttgcgctcactgcccgctttccagtcgggaaacctgtcgtgccagctgcattaatgaatcggccaacgcgcggggagaggcggtttgcgtattgggcgctcttccgcttcctcgctcactgactcgctgcgctcggtcgttcggctgcggcgagcggtatcagctcactcaaaggcggtaatacggttatccacagaatcaggggataacgcaggaaagaacatgtgagcaaaaggccagcaaaaggccaggaaccgtaaaaaggccgcgttgctggcgtttttccataggctccgcccccctgacgagcatcacaaaaatcgacgctcaagtcagaggtggcgaaacccgacaggactataaagataccaggcgtttccccctggaagctccctcgtgcgctctcctgttccgaccctgccgcttaccggatacctgtccgcctttctcccttcgggaagcgtggcgctttctcatagctcacgctgtaggtatctcagttcggtgtaggtcgttcgctccaagctgggctgtgtgcacgaaccccccgttcagcccgaccgctgcgccttatccggtaactatcgtcttgagtccaacccggtaagacacgacttatcgccactggcagcagccactggtaacaggattagcagagcgaggtatgtaggcggtgctacagagttcttgaagtggtggcctaactacggctacactagaagaacagtatttggtatctgcgctctgctgaagccagttaccttcggaaaaagagttggtagctcttgatccggcaaacaaaccaccgctggtagcggtggtttttttgtttgcaagcagcagattacgcgcagaaaaaaaggatctcaagaagatcctttgatcttttctacggggtctgacgctcagtggaacgaaaactcacgttaagggattttggtcatgagattatcaaaaaggatcttcacctagatccttttaaattaaaaatgaagttttaaatcaatctaaagtatatatgagtaaacttggtctgacagttaccaatgcttaatcagtgaggcacctatctcagcgatctgtctatttcgttcatccatagttgcctgactccccgtcgtgtagataactacgatacgggagggcttaccatctggccccagtgctgcaatgataccgcgagacccacgctcaccggctccagatttatcagcaataaaccagccagccggaagggccgagcgcagaagtggtcctgcaactttatccgcctccatccagtctattaattgttgccgggaagctagagtaagtagttcgccagttaatagtttgcgcaacgttgttgccattgctacaggcatcgtggtgtcacgctcgtcgtttggtatggcttcattcagctccggttcccaacgatcaaggcgagttacatgatcccccatgttgtgcaaaaaagcggttagctccttcggtcctccgatcgttgtcagaagtaagttggccgcagtgttatcactcatggttatggcagcactgcataattctcttactgtcatgccatccgtaagatgcttttctgtgactggtgagtactcaaccaagtcattctgagaatagtgtatgcggcgaccgagttgctcttgcccggcgtcaatacgggataataccgcgccacatagcagaactttaaaagtgctcatcattggaaaacgttcttcggggcgaaaactctcaaggatcttaccgctgttgagatccagttcgatgtaacccactcgtgcacccaactgatcttcagcatcttttactttcaccagcgtttctgggtgagcaaaaacaggaaggcaaaatgccgcaaaaaagggaataagggcgacacggaaatgttgaatactcatactcttcctttttcaatattattgaagcatttatcagggttattgtctcatgagcggatacatatttgaatgtatttagaaaaataaacaaataggggttccgcgcacatttccccgaaaagtgccacctgacgtcgaccctagggtcgactctcagtacaatctgctctgatgccgaagcttgagggcctatttcccatgattccttcatatttgcatatacgatacaaggctgttagagagataattagaattaatttgactgtaaacacaaagatattagtacaaaatacgtgacgtagaaagtaataatttcttgggtagtttgcagttttaaaattatgttttaaaatggactatcatatgcttaccgtaacttgaaagtatttcgatttcttggctttatatatcttgtggaaaggacgaaacaccacagacaaaactgtgctagacagttgagaatcgaaagattcttaataaggcatccttccgatgctgacttctcaccgtccgttttccaataggagcgggcggtatgtttttttcatagttaagccagtatctgctccctgcttgtgtgttggaggtcgctgagtagtgcgcgagcaaaatttaagctacaacaaggcaaggcttgaccgacaattgcatgaagaatctgcttagggttaggcgttttgcgctgcttcgcgatgtacgggccagatatacgcgtttcatagttaagccagtatctgctcc

SEQ ID NO: 1424 - protein, 623 aa, unidentified; identical to SEQ ID NO: 1113

SEQ ID NO: 1425 - DNA, 8629 bp, synthetic construct
  source 1..8629: mol_type = other DNA
ttaattaatttgatcggcacgtaagaggttccaactttcaccataatgaaataagatcactaccgggcgtattttttgagttatcgagattttcaggagctaaggaagctaaaatggagaaaaaaatcactggatataccaccgttgatatatcccaatggcatcgtaaagaacattttgaggcatttcagtcagttgctcaatgtacctataaccagaccgttcagctggatattacggcctttttaaagaccgtaaagaaaaataagcacaagttttatccggcctttattcacattcttgcccgcctgatgaatgctcatccggaattccgtatggcaatgaaagacggtgagctggtgatatgggatagtgttcacccttgttacaccgttttccatgagcaaactgaaacgttttcatcgctctggagtgaataccacgacgatttccggcagtttctacacatatattcgcaagatgtggcgtgttacggtgaaaacctggcctatttccctaaagggtttattgagaatatgttttttgtctcagccaatccctgggtgagtttcaccagttttgatttaaacgtggccaatatggacaacttcttcgcccccgttttcaccatgggcaaatattatacgcaaggcgacaaggtgctgatgcccctggcgattcaggtgcactacgccgtctgtgatggcttccatgtcggcagaatgcttaatgaattacaacagtactgcgatgagtggcagggcggggcgtaatttttttaaggcagttattggtgcccttaaacgcctggtgctacgcctgaataagtgaagcatgcaaggagatggcgcccaacagtcccccggccacggggcctgccaccatacccacgccgaaacaagcgctcatgagcccgaagtggcgagcccgatcttccccatcggtgatgtcggcgatataggcgccagcaaccgcacctgtggcgccggtgatgccggccacgatgcgtccggcgtagaggatcgactcgagtgcggccgcaagcttgtcgacggagctcgaattcggatcctaatacgactcactatagcgtagtgcacctgaatcgccgtaactgtccattaataacttagtcaactaagttattataaagttacccgcctaagttcttcgagaactacgttagggatgaaaacataggtactctcgcgatgcttctccagtccgagactctacggggaactattaaacaggtccgatggaaaggccagtgtagtttccattcaaaaccgtcctataacattggctaggagactattacccgcgtcagcggagctaggtaacaatttatgcaaagagtaaaaaaaaaccccgcttcggcggggtttttttttagcatgcaaggagatggcgcccaacagtcccccggccacggggcctgccaccatacccacgccgaaacaagcgctcatgagcccgaagtggcgagcccgatcttccccatcggtgatgtcggcgatataggcgccagcaaccgcacctgtggcgccggtgatgccggccacgatgcgtccggcgtagaggatcgagatctcgatcccgcgaaattaatacgactcactataggggaattgtgagcggataacaattcccctctaggatccgaaataattttgtttaactttaagaaggagatataccccgcggatgcagcgcgttttcgtgctggaccacaacaagcagccactgatgccctgtcatccagcgcgcgcccgtaagttacttaagaaaggcaaagccgcggtgtatcgtcgttatccgtttgccatcatcatgactcatcgtgtcggcggagacctgcagactgttgagatcaagttcgccccgggcagtcgtaccacaggtattgcgctggtcggcgacttcgatcgcggtaaagaggtgatttgggccgggaatctgaatcaccgcggccaccaaattaagtcgaacctgaattcccgccgcgcgattcgtcgtgctcgtcgcaaccgcaaaacccgctaccgccaagctcgcttcaacaatcgtcgccgtccgaagggatggttaccgccgtctctgcgtagccgtgtagacaacacgaagaactggatgcacaaattggcgcgtctggcgccgcttacccagattgccgtggagaccgtgcgcttcgacacccaaaagctccagaagcctgagatctcaggcgtcgagtaccagcagggcgaactggctggatacgaattgcgcgagtatctcctggagaagtggggacgcgagtgcgcatactgcggcgctaagaacatccctctggagatcgagcatattcaggcccgcagtaagggcggctcagaccgtgtgagtaatctgacgctggcctgtacaccgtgcaacattgacaaaggaaacaaagacatcaaggaattcctgagcctgaaaccaaagcgcctgaagaagattcaggcaaccgccaccgccccgctgaaggacgccgccgcggttaacgcgacacgttatgcaaccggtaacgtactgaagtgctttagcttgccaatcacgtttagctcgggcggccgtacgaagttcaatcgcgttaaacttggttatctgaaggatcactggatcgatgccgcgtgcgttggagagtctggcagccaggtggtcatcccaaaggcaattaccccgctgatcattaccagcaaaggccgcggctctcgccaaaagtgccgcatgaaccagtatggattcccccgcacgggtccaaagaagcagaaacaagtgaaaggattccagacaggtgacatcgttaaggcgattgttaccaagggcaagaaaattggtacctacatcggccgcgtcgtagttcgttcacgcgggagtttcgacatcgggtctggagagaagaaggtcggatcaatcagctacaagtactgtcagctgttgcagcgcgccgacggatatgaatatacgtcggggagtgaaacacccggcacatccgaagcttcgacacctgaatctgcctccgaggttgaatttagtcatgaatattggatgcgccacgcgctgacgttagccaaacgtgctcgtgatgagcgcgaagttccagtcggggccgtcttggtccttaacaatcgtgtcattggcgaggggtggaaccgcgctattgggctgcacgatccaacagcgcatgctgagattatggccttgcgtcaaggagggttagtaatgcaaaactaccgtcttattgatgctacgttatactctacattcgaaccctgtgtaatgtgtgcaggagcgatgatccacagtcgtattggccgcgtagtatttggtgtacgcaatgctaaaactggagccgccggatcgttgatggatgtcttgcattaccctggaatgaaccatcgtgtagagatcactgaaggcatccttgccgatgagtgtgcggctttgctttgctatttcttccgtatgccacgtcgtgtttttaacgcccaaaaaaaggctcaatccagtaccgatgggtcaggcctttctcccaagaagaagaggaaagtctaagatccggctgctaacaaagcccgaaaggaagctgagttggctgctgcggccgctgagcaataactagcataaccccttggggcctctaaacgggtcttgaggggttttttgctgaaaggaggaactatatccggattggcgaatgggacgcgccctgtagcggcgcattaagcgcggcgggtgtggtggttacgcgcagcgtgaccgctacacttgccagcgccctagcgcccgctcctttcgctttcttcccttcctttctcgccacgttcgccggctttccccgtcaagctctaaatcgggggctccctttagggttccgatttagtgctttacggcacctcgaccccaaaaaacttgattagggtgatggttcacgtagtgggccatcgccctgatagacggtttttcgccctttgacgttggagtccacgttctttaatagtggactcttgttccaaactggaacaacactcaaccctatctcggtctattcttttgatttataagggattttgccgatttcggcctattggttaaaaaatgagctgatttaacaaaaatttaacgcgaattttaacaaaatattaacgcttacaatttaggtggcacttttcggggaaatgtgcgcggaacccctatttgtttatttttctaaatacattcaaatatgtatccgctcatgagacaataaccctgataaatgcttcaataatattgaaaaaggaagagtatgagtattcaacatttccgtgtcgcccttattcccttttttgcggcattttgccttcctgtttttgctcacccagaaacgctggtgaaagtaaaagatgctgaagatcagttgggtgcacgagtgggttacatcgaactggatctcaacagcggtaagatccttgagagttttcgccccgaagaacgttttccaatgatgagcacttttaaagttctgctatgtggcgcggtattatcccgtattgacgccgggcaagagcaactcggtcgccgcatacactattctcagaatgacttggttgagtactcaccagtcacagaaaagcatcttacggatggcatgacagtaagagaattatgcagtgctgccataaccatgagtgataacactgcggccaacttacttctgacaacgatcggaggaccgaaggagctaaccgcttttttgcacaacatgggggatcatgtaactcgccttgatcgttgggaaccggagctgaatgaagccataccaaacgacgagcgtgacaccacgatgcctgcagcaatggcaacaacgttgcgcaaactattaactggcgaactacttactctagcttcccggcaacaattaatagactggatggaggcggataaagttgcaggaccacttctgcgctcggcccttccggctggctggtttattgctgataaatctggagccggtgagcgtgggtctcgcggtatcattgcagcactggggccagatggtaagccctcccgtatcgtagttatctacacgacggggagtcaggcaactatggatgaacgaaatagacagatcgctgagataggtgcctcactgattaagcattggtaactgtcagaccaagtttactcatatatactttagattgatttaaaacttcatttttaatttaaaaggatctaggtgaagatcctttttgataatctcatgaccaaaatcccttaacgtgagttttcgttccactgagcgtcagaccccgtagaaaagatcaaaggatcttcttgagatcctttttttctgcgcgtaatctgctgcttgcaaacaaaaaaaccaccgctaccagcggtggtttgtttgccggatcaagagctaccaactctttttccgaaggtaactggcttcagcagagcgcagataccaaatactgtccttctagtgtagccgtagttaggccaccacttcaagaactctgtagcaccgcctacatacctcgctctgctaatcctgttaccagtggctgctgccagtggcgataagtcgtgtcttaccgggttggactcaagacgatagttaccggataaggcgcagcggtcgggctgaacggggggttcgtgcacacagcccagcttggagcgaacgacctacaccgaactgagatacctacagcgtgagctatgagaaagcgccacgcttcccgaagggagaaaggcggacaggtatccggtaagcggcagggtcggaacaggagagcgcacgagggagcttccagggggaaacgcctggtatctttatagtcctgtcgggtttcgccacctctgacttgagcgtcgatttttgtgatgctcgtcaggggggcggagcctatggaaaaacgccagcaacgcggcctttttacggttcctggccttttgctggccttttgctcacatgttctttcctgcgttatcccctgattctgtggataaccgtattaccgcctttgagtgagctgataccgctcgccgcagccgaacgaccgagcgcagcgagtcagtgagcgaggaagcggaagagcgcctgatgcggtattttctccttacgcatctgtgcggtatttcacaccgcaatggtgcactctcagtacaatctgctctgatgccgcatagttaagccagtatacactccgctatcgctacgtgactgggtcatggctgcgccccgacacccgccaacacccgctgacgcgccctgacgggcttgtctgctcccggcatccgcttacagacaagctgtgaccgtctccgggagctgcatgtgtcagaggttttcaccgtcatcaccgaaacgcgcgaggcagctgcggtaaagctcatcagcgtggtcgtgaagcgattcacagatgtctgcctgttcatccgcgtccagctcgttgagtttctccagaagcgttaatgtctggcttctgataaagcgggccatgttaagggcggttttttcctgtttggtcactgatgcctccgtgtaagggggatttctgttcatgggggtaatgataccgatgaaacgagagaggatgctcacgatacgggttactgatgatgaacatgcccggttactggaacgttgtgagggtaaacaactggcggtatggatgcggcgggaccagagaaaaatcactcagggtcaatgccagcgcttcgttaatacagatgtaggtgttccacagggtagccagcagcatcctgcgatgcagatccggaacataatggtgcagggcgctgacttccgcgtttccagactttacgaaacacggaaaccgaagaccattcatgttgttgctcaggtcgcagacgttttgcagcagcagtcgcttcacgttcgctcgcgtatcggtgattcattctgctaaccagtaaggcaaccccgccagcctagccgggtcctcaacgacaggagcacgatcatgcgcacccgtggggccgccatgccggcgataatggcctgcttctcgccgaaacgtttggtggcgggaccagtgacgaaggcttgagcgagggcgtgcaagattccgaataccgcaagcgacaggccgatcatcgtcgcgctccagcgaaagcggtcctcgccgaaaatgacccagagcgctgccggcacctgtcctacgagttgcatgataaagaagacagtcataagtgcggcgacgatagtcatgccccgcgcccaccggaaggagctgactgggttgaaggctctcaagggcatcggtcgagatcccggtgcctaatgagtgagctaacttacattaattgcgttgcgctcactgcccgctttccagtcgggaaacctgtcgtgccagctgcattaatgaatcggccaacgcgcggggagaggcggtttgcgtattgggcgccagggtggtttttcttttcaccagtgagacgggcaacagctgattgcccttcaccgcctggccctgagagagttgcagcaagcggtccacgctggtttgccccagcaggcgaaaatcctgtttgatggtggttaacggcgggatataacatgagctgtcttcggtatcgtcgtatcccactaccgagatatccgcaccaacgcgcagcccggactcggtaatggcgcgcattgcgcccagcgccatctgatcgttggcaaccagcatcgcagtgggaacgatgccctcattcagcatttgcatggtttgttgaaaaccggacatggcactccagtcgccttcccgttccgctatcggctgaatttgattgcgagtgagatatttatgccagccagccagacgcagacgcgccgagacagaacttaatgggcccgctaacagcgcgatttgctggtgacccaatgcgaccagatgctccacgcccagtcgcgtaccgtcttcatgggagaaaataatactgttgatgggtgtctggtcagagacatcaagaaataacgccggaacattagtgcaggcagcttccacagcaatggcatcctggtcatccagcggatagttaatgatcagcccactgacgcgttgcgcgagaagattgtgcaccgccgctttacaggcttcgacgccgcttcgttctaccatcgacaccaccacgctggcacccagttgatcggcgcgagatttaatcgccgcgacaatttgcgacggcgcgtgcagggccagactggaggtggcaacgccaatcagcaacgactgtttgcccgccagttgttgtgccacgcggttgggaatgtaattcagctccgccatcgccgcttccactttttcccgcgttttcgcagaaacgtggctggcctggttcaccacgcgggaaacggtctgataagagacaccggcatactctgcgacatcgtataacgttactggtttcacattcaccaccctgaattgactctcttccgggcgctatcatgccataccgcgaaaggttttgcgccattcgatggtgtccgggatctcgacgctctcccttatgcgactcctgcattaggaagcagcccagtagtaggttgaggccgttgagcaccgccgccgcaaggaatggtttaattaattctaga

SEQ ID NO: 1426 - DNA, 8629 bp, synthetic construct
  source 1..8629: mol_type = other DNA
ttaattaatttgatcggcacgtaagaggttccaactttcaccataatgaaataagatcactaccgggcgtattttttgagttatcgagattttcaggagctaaggaagctaaaatggagaaaaaaatcactggatataccaccgttgatatatcccaatggcatcgtaaagaacattttgaggcatttcagtcagttgctcaatgtacctataaccagaccgttcagctggatattacggcctttttaaagaccgtaaagaaaaataagcacaagttttatccggcctttattcacattcttgcccgcctgatgaatgctcatccggaattccgtatggcaatgaaagacggtgagctggtgatatgggatagtgttcacccttgttacaccgttttccatgagcaaactgaaacgttttcatcgctctggagtgaataccacgacgatttccggcagtttctacacatatattcgcaagatgtggcgtgttacggtgaaaacctggcctatttccctaaagggtttattgagaatatgttttttgtctcagccaatccctgggtgagtttcaccagttttgatttaaacgtggccaatatggacaacttcttcgcccccgttttcaccatgggcaaatattatacgcaaggcgacaaggtgctgatgcccctggcgattcaggtgcactacgccgtctgtgatggcttccatgtcggcagaatgcttaatgaattacaacagtactgcgatgagtggcagggcggggcgtaatttttttaaggcagttattggtgcccttaaacgcctggtgctacgcctgaataagtgaagcatgcaaggagatggcgcccaacagtcccccggccacggggcctgccaccatacccacgccgaaacaagcgctcatgagcccgaagtggcgagcccgatcttccccatcggtgatgtcggcgatataggcgccagcaaccgcacctgtggcgccggtgatgccggccacgatgcgtccggcgtagaggatcgactcgagtgcggccgcaagcttgtcgacggagctcgaattcggatcctaatacgactcactataggctacggctcgtccgcataagtaactgtccattaataacttagtcaactaagttattataaagttacccgcctaagttcttcgagaactacgttagggatgaaaacataggtactctcgcgatgcttctccagtccgagactctacggggaactattaaacaggtccgatggaaaggccagtgtagtttccattcaaaaccgtcctataacattggctaggagactattacccgcgtcagcggagctaggtaacaatttatgcaaagagtaaaaaaaaaccccgcttcggcggggtttttttttagcatgcaaggagatggcgcccaacagtcccccggccacggggcctgccaccatacccacgccgaaacaagcgctcatgagcccgaagtggcgagcccgatcttccccatcggtgatgtcggcgatataggcgccagcaaccgcacctgtggcgccggtgatgccggccacgatgcgtccggcgtagaggatcgagatctcgatcccgcgaaattaatacgactcactataggggaattgtgagcggataacaattcccctctaggatccgaaataattttgtttaactttaagaaggagatataccccgcggatgcagcgcgttttcgtgctggaccacaacaagcagccactgatgccctgtcatccagcgcgcgcccgtaagttacttaagaaaggcaaagccgcggtgtatcgtcgttatccgtttgccatcatcatgactcatcgtgtcggcggagacctgcagactgttgagatcaagttcgccccgggcagtcgtaccacaggtattgcgctggtcggcgacttcgatcgcggtaaagaggtgatttgggccgggaatctgaatcaccgcggccaccaaattaagtcgaacctgaattcccgccgcgcgattcgtcgtgctcgtcgcaaccgcaaaacccgctaccgccaagctcgcttcaacaatcgtcgccgtccgaagggatggttaccgccgtctctgcgtagccgtgtagacaacacgaagaactggatgcacaaattggcgcgtctggcgccgcttacccagattgccgtggagaccgtgcgcttcgacacccaaaagctccagaagcctgagatctcaggcgtcgagtaccagcagggcgaactggctggatacgaattgcgcgagtatctcctggagaagtggggacgcgagtgcgcatactgcggcgctaagaacatccctctggagatcgagcatattcaggcccgcagtaagggcggctcagaccgtgtgagtaatctgacgctggcctgtacaccgtgcaacattgacaaaggaaacaaagacatcaaggaattcctgagcctgaaaccaaagcgcctgaagaagattcaggcaaccgccaccgccccgctgaaggacgccgccgcggttaacgcgacacgttatgcaaccggtaacgtactgaagtgctttagcttgccaatcacgtttagctcgggcggccgtacgaagttcaatcgcgttaaacttggttatctgaaggatcactggatcgatgccgcgtgcgttggagagtctggcagccaggtggtcatcccaaaggcaattaccccgctgatcattaccagcaaaggccgcggctctcgccaaaagtgccgcatgaaccagtatggattcccccgcacgggtccaaagaagcagaaacaagtgaaaggattccagacaggtgacatcgttaaggcgattgttaccaagggcaagaaaattggtacctacatcggccgcgtcgtagttcgttcacgcgggagtttcgacatcgggtctggagagaagaaggtcggatcaatcagctacaagtactgtcagctgttgcagcgcgccgacggatatgaatatacgtcggggagtgaaacacccggcacatccgaagcttcgacacctgaatctgcctccgaggttgaatttagtcatgaatattggatgcgccacgcgctgacgttagccaaacgtgctcgtgatgagcgcgaagttccagtcggggccgtcttggtccttaacaatcgtgtcattggcgaggggtggaaccgcgctattgggctgcacgatccaacagcgcatgctgagattatggccttgcgtcaaggagggttagtaatgcaaaactaccgtcttattgatgctacgttatactctacattcgaaccctgtgtaatgtgtgcaggagcgatgatccacagtcgtattggccgcgtagtatttggtgtacgcaatgctaaaactggagccgccggatcgttgatggatgtcttgcattaccctggaatgaaccatcgtgtagagatcactgaaggcatccttgccgatgagtgtgcggctttgctttgctatttcttccgtatgccacgtcgtgtttttaacgcccaaaaaaaggctcaatccagtaccgatgggtcaggcctttctcccaagaagaagaggaaagtctaagatccggctgctaacaaagcccgaaaggaagctgagttggctgctgcggccgctgagcaataactagcataaccccttggggcctctaaacgggtcttgaggggttttttgctgaaaggaggaactatatccggattggcgaatgggacgcgccctgtagcggcgcattaagcgcggcgggtgtggtggttacgcgcagcgtgaccgctacacttgccagcgccctagcgcccgctcctttcgctttcttcccttcctttctcgccacgttcgccggctttccccgtcaagctctaaatcgggggctccctttagggttccgatttagtgctttacggcacctcgaccccaaaaaacttgattagggtgatggttcacgtagtgggccatcgccctgatagacggtttttcgccctttgacgttggagtccacgttctttaatagtggactcttgttccaaactggaacaacactcaaccctatctcggtctattcttttgatttataagggattttgccgatttcggcctattggttaaaaaatgagctgatttaacaaaaatttaacgcgaattttaacaaaatattaacgcttacaatttaggtggcacttttcggggaaatgtgcgcggaacccctatttgtttatttttctaaatacattcaaatatgtatccgctcatgagacaataaccctgataaatgcttcaataatattgaaaaaggaagagtatgagtattcaacatttccgtgtcgcccttattcccttttttgcggcattttgccttcctgtttttgctcacccagaaacgctggtgaaagtaaaagatgctgaagatcagttgggtgcacgagtgggttacatcgaactggatctcaacagcggtaagatccttgagagttttcgccccgaagaacgttttccaatgatgagcacttttaaagttctgctatgtggcgcggtattatcccgtattgacgccgggcaagagcaactcggtcgccgcatacactattctcagaatgacttggttgagtactcaccagtcacagaaaagcatcttacggatggcatgacagtaagagaattatgcagtgctgccataaccatgagtgataacactgcggccaacttacttctgacaacgatcggaggaccgaaggagctaaccgcttttttgcacaacatgggggatcatgtaactcgccttgatcgttgggaaccggagctgaatgaagccataccaaacgacgagcgtgacaccacgatgcctgcagcaatggcaacaacgttgcgcaaactattaactggcgaactacttactctagcttcccggcaacaattaatagactggatggaggcggataaagttgcaggaccacttctgcgctcggcccttccggctggctggtttattgctgataaatctggagccggtgagcgtgggtctcgcggtatcattgcagcactggggccagatggtaagccctcccgtatcgtagttatctacacgacggggagtcaggcaactatggatgaacgaaatagacagatcgctgagataggtgcctcactgattaagcattggtaactgtcagaccaagtttactcatatatactttagattgatttaaaacttcatttttaatttaaaaggatctaggtgaagatcctttttgataatctcatgaccaaaatcccttaacgtgagttttcgttccactgagcgtcagaccccgtagaaaagatcaaaggatcttcttgagatcctttttttctgcgcgtaatctgctgcttgcaaacaaaaaaaccaccgctaccagcggtggtttgtttgccggatcaagagctaccaactctttttccgaaggtaactggcttcagcagagcgcagataccaaatactgtccttctagtgtagccgtagttaggccaccacttcaagaactctgtagcaccgcctacatacctcgctctgctaatcctgttaccagtggctgctgccagtggcgataagtcgtgtcttaccgggttggactcaagacgatagttaccggataaggcgcagcggtcgggctgaacggggggttcgtgcacacagcccagcttggagcgaacgacctacaccgaactgagatacctacagcgtgagctatgagaaagcgccacgcttcccgaagggagaaaggcggacaggtatccggtaagcggcagggtcggaacaggagagcgcacgagggagcttccagggggaaacgcctggtatctttatagtcctgtcgggtttcgccacctctgacttgagcgtcgatttttgtgatgctcgtcaggggggcggagcctatggaaaaacgccagcaacgcggcctttttacggttcctggccttttgctggccttttgctcacatgttctttcctgcgttatcccctgattctgtggataaccgtattaccgcctttgagtgagctgataccgctcgccgcagccgaacgaccgagcgcagcgagtcagtgagcgaggaagcggaagagcgcctgatgcggtattttctccttacgcatctgtgcggtatttcacaccgcaatggtgcactctcagtacaatctgctctgatgccgcatagttaagccagtatacactccgctatcgctacgtgactgggtcatggctgcgccccgacacccgccaacacccgctgacgcgccctgacgggcttgtctgctcccggcatccgcttacagacaagctgtgaccgtctccgggagctgcatgtgtcagaggttttcaccgtcatcaccgaaacgcgcgaggcagctgcggtaaagctcatcagcgtggtcgtgaagcgattcacagatgtctgcctgttcatccgcgtccagctcgttgagtttctccagaagcgttaatgtctggcttctgataaagcgggccatgttaagggcggttttttcctgtttggtcactgatgcctccgtgtaagggggatttctgttcatgggggtaatgataccgatgaaacgagagaggatgctcacgatacgggttactgatgatgaacatgcccggttactggaacgttgtgagggtaaacaactggcggtatggatgcggcgggaccagagaaaaatcactcagggtcaatgccagcgcttcgttaatacagatgtaggtgttccacagggtagccagcagcatcctgcgatgcagatccggaacataatggtgcagggcgctgacttccgcgtttccagactttacgaaacacggaaaccgaagaccattcatgttgttgctcaggtcgcagacgttttgcagcagcagtcgcttcacgttcgctcgcgtatcggtgattcattctgctaaccagtaaggcaaccccgccagcctagccgggtcctcaacgacaggagcacgatcatgcgcacccgtggggccgccatgccggcgataatggcctgcttctcgccgaaacgtttggtggcgggaccagtgacgaaggcttgagcgagggcgtgcaagattccgaataccgcaagcgacaggccgatcatcgtcgcgctccagcgaaagcggtcctcgccgaaaatgacccagagcgctgccggcacctgtcctacgagttgcatgataaagaagacagtcataagtgcggcgacgatagtcatgccccgcgcccaccggaaggagctgactgggttgaaggctctcaagggcatcggtcgagatcccggtgcctaatgagtgagctaacttacattaattgcgttgcgctcactgcccgctttccagtcgggaaacctgtcgtgccagctgcattaatgaatcggccaacgcgcggggagaggcggtttgcgtattgggcgccagggtggtttttcttttcaccagtgagacgggcaacagctgattgcccttcaccgcctggccctgagagagttgcagcaagcggtccacgctggtttgccccagcaggcgaaaatcctgtttgatggtggttaacggcgggatataacatgagctgtcttcggtatcgtcgtatcccactaccgagatatccgcaccaacgcgcagcccggactcggtaatggcgcgcattgcgcccagcgccatctgatcgttggcaaccagcatcgcagtgggaacgatgccctcattcagcatttgcatggtttgttgaaaaccggacatggcactccagtcgccttcccgttccgctatcggctgaatttgattgcgagtgagatatttatgccagccagccagacgcagacgcgccgagacagaacttaatgggcccgctaacagcgcgatttgctggtgacccaatgcgaccagatgctccacgcccagtcgcgtaccgtcttcatgggagaaaataatactgttgatgggtgtctggtcagagacatcaagaaataacgccggaacattagtgcaggcagcttccacagcaatggcatcctggtcatccagcggatagttaatgatcagcccactgacgcgttgcgcgagaagattgtgcaccgccgctttacaggcttcgacgccgcttcgttctaccatcgacaccaccacgctggcacccagttgatcggcgcgagatttaatcgccgcgacaatttgcgacggcgcgtgcagggccagactggaggtggcaacgccaatcagcaacgactgtttgcccgccagttgttgtgccacgcggttgggaatgtaattcagctccgccatcgccgcttccactttttcccgcgttttcgcagaaacgtggctggcctggttcaccacgcgggaaacggtctgataagagacaccggcatactctgcgacatcgtataacgttactggtttcacattcaccaccctgaattgactctcttccgggcgctatcatgccataccgcgaaaggttttgcgccattcgatggtgtccgggatctcgacgctctcccttatgcgactcctgcattaggaagcagcccagtagtaggttgaggccgttgagcaccgccgccgcaaggaatggtttaattaattctaga

SEQ ID NO: 1427 - RNA, 249 nt, synthetic construct
  source 1..249: mol_type = other RNA
gtaactgtccattaataacttagtcaactaagttattataaagttacccgcctaagttcttcgagaactacgttagggatgaaaacataggtactctcgcgatgcttctccagtccgagactctacggggaactattaaacaggtccgatggaaaggccagtgtagtttccattcaaaaccgtcctataacattggctaggagactattacccgcgtcagcggagctaggtaacaatttatgcaaagag

SEQ ID NO: 1428 - RNA, 249 nt, synthetic construct; identical to SEQ ID NO: 1427
  source 1..249: mol_type = other RNA

SEQ ID NO: 1429 - RNA, 20 nt, synthetic construct
  source 1..20: mol_type = other RNA
cgtagtgcacctgaatcgcc

SEQ ID NO: 1430 - RNA, 20 nt, synthetic construct
  source 1..20: mol_type = other RNA
gctacggctcgtccgcataa

SEQ ID NO: 1431 - RNA, 110 nt, synthetic construct
  source 1..110: mol_type = other RNA
  modified_base 1: mod_base = cm
  modified_base 2: mod_base = um
  modified_base 3: mod_base = gm
  modified_base 108: mod_base = um
  modified_base 109: mod_base = um
  modified_base 110: mod_base = um
  modified_base 1^2: mod_base = OTHER; note = phosphorothioate bond
  modified_base 2^3: mod_base = OTHER; note = phosphorothioate bond
  modified_base 3^4: mod_base = OTHER; note = phosphorothioate bond
  modified_base 107^108: mod_base = OTHER; note = phosphorothioate bond
  modified_base 108^109: mod_base = OTHER; note = phosphorothioate bond
  modified_base 109^110: mod_base = OTHER; note = phosphorothioate bond
ctggtgtggtactcgttcaagggttgagaatcgaaagattcttaataaggcatccttccgatgctgacttctcaccgtccgttttccaataggagcgggcggtatgtttt

SEQ ID NO: 1432 - RNA, 110 nt, synthetic construct
  source 1..110: mol_type = other RNA
  modified_base 1: mod_base = OTHER; note = 2'-O-Methyladenosine
  modified_base 2: mod_base = cm
  modified_base 3: mod_base = um
  modified_base 108: mod_base = um
  modified_base 109: mod_base = um
  modified_base 110: mod_base = um
  modified_base 1^2: mod_base = OTHER; note = phosphorothioate bond
  modified_base 2^3: mod_base = OTHER; note = phosphorothioate bond
  modified_base 3^4: mod_base = OTHER; note = phosphorothioate bond
  modified_base 107^108: mod_base = OTHER; note = phosphorothioate bond
  modified_base 108^109: mod_base = OTHER; note = phosphorothioate bond
  modified_base 109^110: mod_base = OTHER; note = phosphorothioate bond
actatggcgcaggtcctccagcgttgagaatcgaaagattcttaataaggcatccttccgatgctgacttctcaccgtccgttttccaataggagcgggcggtatgtttt

SEQ ID NO: 1433 - RNA, 110 nt, synthetic construct
  source 1..110: mol_type = other RNA
  modified_base 1: mod_base = um
  modified_base 2: mod_base = um
  modified_base 3: mod_base = gm
  modified_base 108: mod_base = um
  modified_base 109: mod_base = um
  modified_base 110: mod_base = um
  modified_base 1^2: mod_base = OTHER; note = phosphorothioate bond
  modified_base 2^3: mod_base = OTHER; note = phosphorothioate bond
  modified_base 3^4: mod_base = OTHER; note = phosphorothioate bond
  modified_base 107^108: mod_base = OTHER; note = phosphorothioate bond
  modified_base 108^109: mod_base = OTHER; note = phosphorothioate bond
  modified_base 109^110: mod_base = OTHER; note = phosphorothioate bond
ttgggtgagacaggagatgaacgttgagaatcgaaagattcttaataaggcatccttccgatgctgacttctcaccgtccgttttccaataggagcgggcggtatgtttt

SEQ ID NO: 1434 - RNA, 110 nt, synthetic construct
  source 1..110: mol_type = other RNA
  modified_base 1: mod_base = um
  modified_base 2: mod_base = cm
  modified_base 3: mod_base = um
  modified_base 108: mod_base = um
  modified_base 109: mod_base = um
  modified_base 110: mod_base = um
  modified_base 1^2: mod_base = OTHER; note = phosphorothioate bond
  modified_base 2^3: mod_base = OTHER; note = phosphorothioate bond
  modified_base 3^4: mod_base = OTHER; note = phosphorothioate bond
  ncRNA 107^108: ncRNA_class = other; note = phosphorothioate bond
  modified_base 108^109: mod_base = OTHER; note = phosphorothioate bond
  modified_base 109^110: mod_base = OTHER; note = phosphorothioate bond
tctcctggaaaactgggacactgttgagaatcgaaagattcttaataaggcatccttccgatgctgacttctcaccgtccgttttccaataggagcgggcggtatgtttt

SEQ ID NO: 1435 - RNA, 110 nt, synthetic construct
  source 1..110: mol_type = other RNA
  modified_base 1: mod_base = OTHER; note = 2'-O-Methyladenosine
  modified_base 2: mod_base = gm
  modified_base 3: mod_base = gm
  modified_base 108: mod_base = um
  modified_base 109: mod_base = um
  modified_base 110: mod_base = um
  modified_base 1^2: mod_base = OTHER; note = phosphorothioate bond
  modified_base 2^3: mod_base = OTHER; note = phosphorothioate bond
  modified_base 3^4: mod_base = OTHER; note = phosphorothioate bond
  modified_base 107^108: mod_base = OTHER; note = phosphorothioate bond
  modified_base 108^109: mod_base = OTHER; note = phosphorothioate bond
  modified_base 109^110: mod_base = OTHER; note = phosphorothioate bond
aggaacggctgggcccattgacgttgagaatcgaaagattcttaataaggcatccttccgatgctgacttctcaccgtccgttttccaataggagcgggcggtatgtttt

SEQ ID NO: 1436 - RNA, 110 nt, synthetic construct
  source 1..110: mol_type = other RNA
  modified_base 1: mod_base = cm
  modified_base 2: mod_base = um
  modified_base 3: mod_base = gm
  modified_base 108: mod_base = um
  modified_base 109: mod_base = um
  modified_base 110: mod_base = um
  modified_base 1^2: mod_base = OTHER; note = phosphorothioate bond
  modified_base 2^3: mod_base = OTHER; note = phosphorothioate bond
  modified_base 3^4: mod_base = OTHER; note = phosphorothioate bond
  modified_base 107^108: mod_base = OTHER; note = phosphorothioate bond
  modified_base 108^109: mod_base = OTHER; note = phosphorothioate bond
  modified_base 109^110: mod_base = OTHER; note = phosphorothioate bond
ctgggataacctggagaaagaagttgagaatcgaaagattcttaataaggcatccttccgatgctgacttctcaccgtccgttttccaataggagcgggcggtatgtttt

SEQ ID NO: 1437 - RNA, 110 nt, synthetic construct
  source 1..110: mol_type = other RNA
  modified_base 1: mod_base = cm
  modified_base 2: mod_base = cm
  modified_base 3: mod_base = um
  modified_base 108: mod_base = um
  modified_base 109: mod_base = um
  modified_base 110: mod_base = um
  modified_base 1^2: mod_base = OTHER; note = phosphorothioate bond
  modified_base 2^3: mod_base = OTHER; note = phosphorothioate bond
  modified_base 3^4: mod_base = OTHER; note = phosphorothioate bond
  modified_base 107^108: mod_base = OTHER; note = phosphorothioate bond
  modified_base 108^109: mod_base = OTHER; note = phosphorothioate bond
  modified_base 109^110: mod_base = OTHER; note = phosphorothioate bond
cctggtgtggtactcgttcaaggttgagaatcgaaagattcttaataaggcatccttccgatgctgacttctcaccgtccgttttccaataggagcgggcggtatgtttt

SEQ ID NO: 1438 - RNA, 110 nt, synthetic construct
  source 1..110: mol_type = other RNA
  modified_base 1: mod_base = OTHER; note = 2'-O-Methyladenosine
  modified_base 2: mod_base = gm
  modified_base 3: mod_base = cm
  modified_base 108: mod_base = um
  modified_base 109: mod_base = um
  modified_base 110: mod_base = um
  modified_base 1^2: mod_base = OTHER; note = phosphorothioate bond
  modified_base 2^3: mod_base = OTHER; note = phosphorothioate bond
  modified_base 3^4: mod_base = OTHER; note = phosphorothioate bond
  modified_base 107^108: mod_base = OTHER; note = phosphorothioate bond
  modified_base 108^109: mod_base = OTHER; note = phosphorothioate bond
  modified_base 109^110: mod_base = OTHER; note = phosphorothioate bond
agcatgggcatcagactatggcgttgagaatcgaaagattcttaataaggcatccttccgatgctgacttctcaccgtccgttttccaataggagcgggcggtatgtttt

SEQ ID NO: 1439 - RNA, 110 nt, synthetic construct
  source 1..110: mol_type = other RNA
  modified_base 1: mod_base = cm
  modified_base 2: mod_base = um
  modified_base 3: mod_base = cm
  modified_base 108: mod_base = um
  modified_base 109: mod_base = um
  modified_base 110: mod_base = um
  modified_base 1^2: mod_base = OTHER; note = phosphorothioate bond
  modified_base 2^3: mod_base = OTHER; note = phosphorothioate bond
  modified_base 3^4: mod_base = OTHER; note = phosphorothioate bond
  modified_base 107^108: mod_base = OTHER; note = phosphorothioate bond
  modified_base 108^109: mod_base = OTHER; note = phosphorothioate bond
  modified_base 109^110: mod_base = OTHER; note = phosphorothioate bond
ctcctggaaaactgggacactcgttgagaatcgaaagattcttaataaggcatccttccgatgctgacttctcaccgtccgttttccaataggagcgggcggtatgtttt

SEQ ID NO: 1440 - RNA, 110 nt, synthetic construct
  source 1..110: mol_type = other RNA
  modified_base 1: mod_base = gm
  modified_base 2: mod_base = gm
  modified_base 3: mod_base = OTHER; note = 2'-O-Methyladenosine
  modified_base 108: mod_base = um
  modified_base 109: mod_base = um
  modified_base 110: mod_base = um
  modified_base 1^2: mod_base = OTHER; note = phosphorothioate bond
  modified_base 2^3: mod_base = OTHER; note = phosphorothioate bond
  modified_base 3^4: mod_base = OTHER; note = phosphorothioate bond
  modified_base 107^108: mod_base = OTHER; note = phosphorothioate bond
  modified_base 108^109: mod_base = OTHER; note = phosphorothioate bond
  modified_base 109^110: mod_base = OTHER; note = phosphorothioate bond
ggaacggctgggcccattgactgttgagaatcgaaagattcttaataaggcatccttccgatgctgacttctcaccgtccgttttccaataggagcgggcggtatgtttt

SEQ ID NO: 1441 - RNA, 110 nt, synthetic construct
  source 1..110: mol_type = other RNA
  modified_base 1: mod_base = gm
  modified_base 2: mod_base = cm
  modified_base 3: mod_base = cm
  modified_base 108: mod_base = um
  modified_base 109: mod_base = um
  modified_base 110: mod_base = um
  modified_base 1^2: mod_base = OTHER; note = phosphorothioate bond
  modified_base 2^3: mod_base = OTHER; note = phosphorothioate bond
  modified_base 3^4: mod_base = OTHER; note = phosphorothioate bond
  modified_base 107^108: mod_base = OTHER; note = phosphorothioate bond
  modified_base 108^109: mod_base = OTHER; note = phosphorothioate bond
  modified_base 109^110: mod_base = OTHER; note = phosphorothioate bond
gccacaggggacagtctcccttgttgagaatcgaaagattcttaataaggcatccttccgatgctgacttctcaccgtccgttttccaataggagcgggcggtatgtttt

SEQ ID NO: 1442 - RNA, 110 nt, synthetic construct
  source 1..110: mol_type = other RNA
  modified_base 1: mod_base = cm
  modified_base 2: mod_base = OTHER; note = 2'-O-Methyladenosine
  modified_base 3: mod_base = gm
  modified_base 108: mod_base = um
  modified_base 109: mod_base = um
  modified_base 110: mod_base = um
  modified_base 1^2: mod_base = OTHER; note = phosphorothioate bond
  modified_base 2^3: mod_base = OTHER; note = phosphorothioate bond
  modified_base 3^4: mod_base = OTHER; note = phosphorothioate bond
  modified_base 107^108: mod_base = OTHER; note = phosphorothioate bond
  modified_base 108^109: mod_base = OTHER; note = phosphorothioate bond
  modified_base 109^110: mod_base = OTHER; note = phosphorothioate bond
cagcgaacagatgcgcgagagcgttgagaatcgaaagattcttaataaggcatccttccgatgctgacttctcaccgtccgttttccaataggagcgggcggtatgtttt

SEQ ID NO: 1443 - RNA, 110 nt, synthetic construct
  source 1..110: mol_type = other RNA
  modified_base 1: mod_base = OTHER; note = 2'-O-Methyladenosine
  modified_base 2: mod_base = um
  modified_base 3: mod_base = um
  modified_base 108: mod_base = um
  modified_base 109: mod_base = um
  modified_base 109: mod_base = um
  modified_base 1^2: mod_base = OTHER; note = phosphorothioate bond
  modified_base 2^3: mod_base = OTHER; note = phosphorothioate bond
  modified_base 3^4: mod_base = OTHER; note = phosphorothioate bond
  modified_base 107^108: mod_base = OTHER; note = phosphorothioate bond
  modified_base 108^109: mod_base = OTHER; note = phosphorothioate bond
  modified_base 109^110: mod_base = OTHER; note = phosphorothioate bond
attgggtgagacaggagatgaagttgagaatcgaaagattcttaataaggcatccttccgatgctgacttctcaccgtccgttttccaataggagcgggcggtatgtttt

SEQ ID NO: 1444 - RNA, 110 nt, synthetic construct
  source 1..110: mol_type = other RNA
  modified_base 1: mod_base = OTHER; note = 2'-O-Methyladenosine
  modified_base 2: mod_base = gm
  modified_base 3: mod_base = gm
  modified_base 108: mod_base = um
  modified_base 109: mod_base = um
  modified_base 110: mod_base = um
  modified_base 1^2: mod_base = OTHER; note = phosphorothioate bond
  modified_base 2^3: mod_base = OTHER; note = phosphorothioate bond
  modified_base 3^4: mod_base = OTHER; note = phosphorothioate bond
  modified_base 107^108: mod_base = OTHER; note = phosphorothioate bond
  modified_base 108^109: mod_base = OTHER; note = phosphorothioate bond
  modified_base 109^110: mod_base = OTHER; note = phosphorothioate bond
agggagactgtcccctgtggctgttgagaatcgaaagattcttaataaggcatccttccgatgctgacttctcaccgtccgttttccaataggagcgggcggtatgtttt

SEQ ID NO: 1445 - RNA, 110 nt, synthetic construct
  source 1..110: mol_type = other RNA
  modified_base 1: mod_base = cm
  modified_base 2: mod_base = cm
  modified_base 3: mod_base = um
  modified_base 108: mod_base = um
  modified_base 109: mod_base = um
  modified_base 110: mod_base = um
  modified_base 1^2: mod_base = OTHER; note = phosphorothioate bond
  modified_base 2^3: mod_base = OTHER; note = phosphorothioate bond
  modified_base 3^4: mod_base = OTHER; note = phosphorothioate bond
  modified_base 107^108: mod_base = OTHER; note = phosphorothioate bond
  modified_base 108^109: mod_base = OTHER; note = phosphorothioate bond
  modified_base 109^110: mod_base = OTHER; note = phosphorothioate bond
cctaccttgaacgagtaccacagttgagaatcgaaagattcttaataaggcatccttccgatgctgacttctcaccgtccgttttccaataggagcgggcggtatgtttt

SEQ ID NO: 1446 - RNA, 110 nt, synthetic construct
  source 1..110: mol_type = other RNA
  modified_base 1: mod_base = gm
  modified_base 2: mod_base = gm
  modified_base 3: mod_base = cm
  modified_base 108: mod_base = um
  modified_base 109: mod_base = um
  modified_base 110: mod_base = um
  modified_base 1^2: mod_base = OTHER; note = phosphorothioate bond
  modified_base 2^3: mod_base = OTHER; note = phosphorothioate bond
  modified_base 3^4: mod_base = OTHER; note = phosphorothioate bond
  modified_base 107^108: mod_base = OTHER; note = phosphorothioate bond
  modified_base 108^109: mod_base = OTHER; note = phosphorothioate bond
  modified_base 109^110: mod_base = OTHER; note = phosphorothioate bond
ggcccaaggaggaggattcaaagttgagaatcgaaagattcttaataaggcatccttccgatgctgacttctcaccgtccgttttccaataggagcgggcggtatgtttt

SEQ ID NO: 1447 - RNA, 110 nt, synthetic construct
  source 1..110: mol_type = other RNA
  modified_base 1: mod_base = OTHER; note = 2'-O-Methyladenosine
  modified_base 2: mod_base = gm
  modified_base 3: mod_base = cm
  modified_base 108: mod_base = um
  modified_base 109: mod_base = um
  modified_base 110: mod_base = um
  modified_base 1^2: mod_base = OTHER; note = phosphorothioate bond
  modified_base 2^3: mod_base = OTHER; note = phosphorothioate bond
  modified_base 3^4: mod_base = OTHER; note = phosphorothioate bond
  modified_base 107^108: mod_base = OTHER; note = phosphorothioate bond
  modified_base 108^109: mod_base = OTHER; note = phosphorothioate bond
  modified_base 109^110: mod_base = OTHER; note = phosphorothioate bond
agcaagatgaaccccagtcccagttgagaatcgaaagattcttaataaggcatccttccgatgctgacttctcaccgtccgttttccaataggagcgggcggtatgtttt

SEQ ID NO: 1448 - RNA, 110 nt, synthetic construct
  source 1..110: mol_type = other RNA
  modified_base 1: mod_base = cm
  modified_base 2: mod_base = um
  modified_base 3: mod_base = OTHER; note = 2'-O-Methyladenosine ,
  modified_base 108: mod_base = um
  modified_base 109: mod_base = um
  modified_base 110: mod_base = um
  modified_base 1^2: mod_base = OTHER; note = phosphorothioate bond
  modified_base 2^3: mod_base = OTHER; note = phosphorothioate bond
  modified_base 3^4: mod_base = OTHER; note = phosphorothioate bond
  modified_base 107^108: mod_base = OTHER; note = phosphorothioate bond
  modified_base 108^109: mod_base = OTHER; note = phosphorothioate bond
  modified_base 109^110: mod_base = OTHER; note = phosphorothioate bond
ctaccttgaacgagtaccacacgttgagaatcgaaagattcttaataaggcatccttccgatgctgacttctcaccgtccgttttccaataggagcgggcggtatgtttt

SEQ ID NO: 1449 - RNA, 110 nt, synthetic construct
  source 1..110: mol_type = other RNA
  modified_base 1: mod_base = cm
  modified_base 2: mod_base = OTHER; note = 2'-O-Methyladenosine
  modified_base 3: mod_base = um
  modified_base 108: mod_base = um
  modified_base 109: mod_base = um
  modified_base 110: mod_base = um
  modified_base 1^2: mod_base = OTHER; note = phosphorothioate bond
  modified_base 2^3: mod_base = OTHER; note = phosphorothioate bond
  modified_base 3^4: mod_base = OTHER; note = phosphorothioate bond
  modified_base 107^108: mod_base = OTHER; note = phosphorothioate bond
  modified_base 108^109: mod_base = OTHER; note = phosphorothioate bond
  modified_base 109^110: mod_base = OTHER; note = phosphorothioate bond
catgctggagacgcttaagaccgttgagaatcgaaagattcttaataaggcatccttccgatgctgacttctcaccgtccgttttccaataggagcgggcggtatgtttt

SEQ ID NO: 1450 - RNA, 110 nt, synthetic construct
  source 1..110: mol_type = other RNA
  modified_base 1: mod_base = um
  modified_base 2: mod_base = cm
  modified_base 3: mod_base = gm
  modified_base 108: mod_base = um
  modified_base 109: mod_base = um
  modified_base 110: mod_base = um
  modified_base 1^2: mod_base = OTHER; note = phosphorothioate bond
  modified_base 2^3: mod_base = OTHER; note = phosphorothioate bond
  modified_base 3^4: mod_base = OTHER; note = phosphorothioate bond
  modified_base 107^108: mod_base = OTHER; note = phosphorothioate bond
  modified_base 108^109: mod_base = OTHER; note = phosphorothioate bond
  modified_base 109^110: mod_base = OTHER; note = phosphorothioate bond
tcgcgaccgcatgcgcacacacgttgagaatcgaaagattcttaataaggcatccttccgatgctgacttctcaccgtccgttttccaataggagcgggcggtatgtttt

SEQ ID NO: 1451 - RNA, 110 nt, synthetic construct
  source 1..110: mol_type = other RNA
  modified_base 1: mod_base = OTHER; note = 2'-O-Methyladenosine
  modified_base 2: mod_base = cm
  modified_base 3: mod_base = gm
  modified_base 108: mod_base = um
  modified_base 109: mod_base = um
  modified_base 110: mod_base = um
  modified_base 1^2: mod_base = OTHER; note = phosphorothioate bond
  modified_base 2^3: mod_base = OTHER; note = phosphorothioate bond
  modified_base 3^4: mod_base = OTHER; note = phosphorothioate bond
  modified_base 107^108: mod_base = OTHER; note = phosphorothioate bond
  modified_base 108^109: mod_base = OTHER; note = phosphorothioate bond
  modified_base 109^110: mod_base = OTHER; note = phosphorothioate bond
acgaattccagaagaaatggaagttgagaatcgaaagattcttaataaggcatccttccgatgctgacttctcaccgtccgttttccaataggagcgggcggtatgtttt

SEQ ID NO: 1452 - RNA, 110 nt, synthetic construct
  source 1..110: mol_type = other RNA
  modified_base 1: mod_base = cm
  modified_base 2: mod_base = um
  modified_base 3: mod_base = OTHER; note = 2'-O-Methyladenosine
  modified_base 108: mod_base = um
  modified_base 109: mod_base = um
  modified_base 110: mod_base = um
  modified_base 1^2: mod_base = OTHER; note = phosphorothioate bond
  modified_base 2^3: mod_base = OTHER; note = phosphorothioate bond
  modified_base 3^4: mod_base = OTHER; note = phosphorothioate bond
  modified_base 107^108: mod_base = OTHER; note = phosphorothioate bond
  modified_base 108^109: mod_base = OTHER; note = phosphorothioate bond
  modified_base 109^110: mod_base = OTHER; note = phosphorothioate bond
ctagcctgaatctcctggaaaagttgagaatcgaaagattcttaataaggcatccttccgatgctgacttctcaccgtccgttttccaataggagcgggcggtatgtttt

SEQ ID NO: 1453 - RNA, 110 nt, synthetic construct
  source 1..110: mol_type = other RNA
  modified_base 1: mod_base = um
  modified_base 2: mod_base = gm
  modified_base 3: mod_base = gm
  modified_base 108: mod_base = um
  modified_base 109: mod_base = um
  modified_base 110: mod_base = um
  modified_base 1^2: mod_base = OTHER; note = phosphorothioate bond
  modified_base 2^3: mod_base = OTHER; note = phosphorothioate bond
  modified_base 3^4: mod_base = OTHER; note = phosphorothioate bond
  modified_base 107^108: mod_base = OTHER; note = phosphorothioate bond
  modified_base 108^109: mod_base = OTHER; note = phosphorothioate bond
  modified_base 109^110: mod_base = OTHER; note = phosphorothioate bond
tgggcccattgactcgggacttgttgagaatcgaaagattcttaataaggcatccttccgatgctgacttctcaccgtccgttttccaataggagcgggcggtatgtttt

SEQ ID NO: 1454 - RNA, 110 nt, synthetic construct
  source 1..110: mol_type = other RNA
  modified_base 1: mod_base = cm
  modified_base 2: mod_base = gm
  modified_base 3: mod_base = OTHER; note = 2'-O-Methyladenosine
  modified_base 108: mod_base = um
  modified_base 109: mod_base = um
  modified_base 110: mod_base = um
  modified_base 1^2: mod_base = OTHER; note = phosphorothioate bond
  modified_base 2^3: mod_base = OTHER; note = phosphorothioate bond
  modified_base 3^4: mod_base = OTHER; note = phosphorothioate bond
  modified_base 107^108: mod_base = OTHER; note = phosphorothioate bond
  modified_base 108^109: mod_base = OTHER; note = phosphorothioate bond
  modified_base 109^110: mod_base = OTHER; note = phosphorothioate bond
cgagaaagccagacctgcgctggttgagaatcgaaagattcttaataaggcatccttccgatgctgacttctcaccgtccgttttccaataggagcgggcggtatgtttt

SEQ ID NO: 1455 - DNA, 22 bp, synthetic construct
  source 1..22: mol_type = other DNA
ctggtgtggtactcgttcaagg

SEQ ID NO: 1456 - DNA, 22 bp, synthetic construct
  source 1..22: mol_type = other DNA
actatggcgcaggtcctccagc

SEQ ID NO: 1457 - DNA, 22 bp, synthetic construct
  source 1..22: mol_type = other DNA
ttgggtgagacaggagatgaac

SEQ ID NO: 1458 - DNA, 22 bp, synthetic construct
  source 1..22: mol_type = other DNA
tctcctggaaaactgggacact

SEQ ID NO: 1459 - DNA, 22 bp, synthetic construct
  source 1..22: mol_type = other DNA
aggaacggctgggcccattgac

SEQ ID NO: 1460 - DNA, 22 bp, synthetic construct
  source 1..22: mol_type = other DNA
ctgggataacctggagaaagaa

SEQ ID NO: 1461 - DNA, 22 bp, synthetic construct
  source 1..22: mol_type = other DNA
cctggtgtggtactcgttcaag

SEQ ID NO: 1462 - DNA, 22 bp, synthetic construct
  source 1..22: mol_type = other DNA
agcatgggcatcagactatggc

SEQ ID NO: 1463 - DNA, 22 bp, synthetic construct
  source 1..22: mol_type = other DNA
ctcctggaaaactgggacactc

SEQ ID NO: 1464 - DNA, 22 bp, synthetic construct
  source 1..22: mol_type = other DNA
ggaacggctgggcccattgact

SEQ ID NO: 1465 - DNA, 22 bp, synthetic construct
  source 1..22: mol_type = other DNA
gccacaggggacagtctccctt

SEQ ID NO: 1466 - DNA, 22 bp, synthetic construct
  source 1..22: mol_type = other DNA
cagcgaacagatgcgcgagagc

SEQ ID NO: 1467 - DNA, 22 bp, synthetic construct
  source 1..22: mol_type = other DNA
attgggtgagacaggagatgaa

SEQ ID NO: 1468 - DNA, 22 bp, synthetic construct
  source 1..22: mol_type = other DNA
agggagactgtcccctgtggct

SEQ ID NO: 1469 - DNA, 22 bp, synthetic construct
  source 1..22: mol_type = other DNA
cctaccttgaacgagtaccaca

SEQ ID NO: 1470 - DNA, 22 bp, synthetic construct
  source 1..22: mol_type = other DNA
ggcccaaggaggaggattcaaa

SEQ ID NO: 1471 - DNA, 22 bp, synthetic construct
  source 1..22: mol_type = other DNA
agcaagatgaaccccagtccca

SEQ ID NO: 1472 - DNA, 22 bp, synthetic construct
  source 1..22: mol_type = other DNA
ctaccttgaacgagtaccacac

SEQ ID NO: 1473 - DNA, 22 bp, synthetic construct
  source 1..22: mol_type = other DNA
catgctggagacgcttaagacc

SEQ ID NO: 1474 - DNA, 22 bp, synthetic construct
  source 1..22: mol_type = other DNA
tcgcgaccgcatgcgcacacac

SEQ ID NO: 1475 - DNA, 22 bp, synthetic construct
  source 1..22: mol_type = other DNA
acgaattccagaagaaatggaa

SEQ ID NO: 1476 - DNA, 22 bp, synthetic construct
  source 1..22: mol_type = other DNA
ctagcctgaatctcctggaaaa

SEQ ID NO: 1477 - DNA, 22 bp, synthetic construct
  source 1..22: mol_type = other DNA
tgggcccattgactcgggactt

SEQ ID NO: 1478 - DNA, 22 bp, synthetic construct
  source 1..22: mol_type = other DNA
cgagaaagccagacctgcgctg

SEQ ID NO: 1479 - RNA, 110 nt, synthetic construct
  source 1..110: mol_type = other RNA
  modified_base 1: mod_base = OTHER; note = 2'-O-Methyladenosine
  modified_base 2: mod_base = cm
  modified_base 3: mod_base = um
  modified_base 108: mod_base = um
  modified_base 109: mod_base = um
  modified_base 110: mod_base = um
  modified_base 1^2: mod_base = OTHER; note = phosphorothioate bond
  modified_base 2^3: mod_base = OTHER; note = phosphorothioate bond
  modified_base 3^4: mod_base = OTHER; note = phosphorothioate bond
  modified_base 107^108: mod_base = OTHER; note = phosphorothioate bond
  modified_base 108^109: mod_base = OTHER; note = phosphorothioate bond
  modified_base 109^110: mod_base = OTHER; note = phosphorothioate bond
actattaaaccaagaaactcccgttgagaatcgaaagattcttaataaggcatccttccgatgctgacttctcaccgtccgttttccaataggagcgggcggtatgtttt

SEQ ID NO: 1480 - RNA, 110 nt, synthetic construct
  source 1..110: mol_type = other RNA
  modified_base 1: mod_base = cm
  modified_base 2: mod_base = gm
  modified_base 3: mod_base = OTHER; note = 2'-O-Methyladenosine
  modified_base 108: mod_base = um
  modified_base 109: mod_base = um
  modified_base 110: mod_base = um
  modified_base 1^2: mod_base = OTHER; note = phosphorothioate bond
  modified_base 2^3: mod_base = OTHER; note = phosphorothioate bond
  modified_base 3^4: mod_base = OTHER; note = phosphorothioate bond
  modified_base 107^108: mod_base = OTHER; note = phosphorothioate bond
  modified_base 109^110: mod_base = OTHER; note = phosphorothioate bond
  modified_base 108^109: mod_base = OTHER; note = phosphorothioate bond
cgaaacatgggaaaactacgaagttgagaatcgaaagattcttaataaggcatccttccgatgctgacttctcaccgtccgttttccaataggagcgggcggtatgtttt

SEQ ID NO: 1481 - RNA, 110 nt, synthetic construct
  source 1..110: mol_type = other RNA
  modified_base 1: mod_base = OTHER; note = 2'-O-Methyladenosine
  modified_base 2: mod_base = gm
  modified_base 3: mod_base = um
  modified_base 108: mod_base = um
  modified_base 109: mod_base = um
  modified_base 110: mod_base = um
  modified_base 1^2: mod_base = OTHER; note = phosphorothioate bond
  modified_base 2^3: mod_base = OTHER; note = phosphorothioate bond
  modified_base 3^4: mod_base = OTHER; note = phosphorothioate bond
  modified_base 107^108: mod_base = OTHER; note = phosphorothioate bond
  modified_base 108^109: mod_base = OTHER; note = phosphorothioate bond
  modified_base 109^110: mod_base = OTHER; note = phosphorothioate bond
agtaattgcatccagagtggatgttgagaatcgaaagattcttaataaggcatccttccgatgctgacttctcaccgtccgttttccaataggagcgggcggtatgtttt

SEQ ID NO: 1482 - RNA, 110 nt, synthetic construct
  source 1..110: mol_type = other RNA
  modified_base 1: mod_base = OTHER; note = 2'-O-Methyladenosine
  modified_base 2: mod_base = OTHER; note = 2'-O-Methyladenosine
  modified_base 3: mod_base = gm
  modified_base 108: mod_base = um
  modified_base 109: mod_base = um
  modified_base 110: mod_base = um
  modified_base 1^2: mod_base = OTHER; note = phosphorothioate bond
  modified_base 2^3: mod_base = OTHER; note = phosphorothioate bond
  modified_base 3^4: mod_base = OTHER; note = phosphorothioate bond
  modified_base 107^108: mod_base = OTHER; note = phosphorothioate bond
  modified_base 109^110: mod_base = OTHER; note = phosphorothioate bond
  modified_base 108^109: mod_base = OTHER; note = phosphorothioate bond
aagagaagacagcccttcaacagttgagaatcgaaagattcttaataaggcatccttccgatgctgacttctcaccgtccgttttccaataggagcgggcggtatgtttt

SEQ ID NO: 1483 - RNA, 110 nt, synthetic construct
  source 1..110: mol_type = other RNA
  modified_base 1: mod_base = um
  modified_base 2: mod_base = um
  modified_base 3: mod_base = um
  modified_base 108: mod_base = um
  modified_base 109: mod_base = um
  modified_base 110: mod_base = um
  modified_base 1^2: mod_base = OTHER; note = phosphorothioate bond
  modified_base 2^3: mod_base = OTHER; note = phosphorothioate bond
  modified_base 3^4: mod_base = OTHER; note = phosphorothioate bond
  modified_base 107^108: mod_base = OTHER; note = phosphorothioate bond
  modified_base 108^109: mod_base = OTHER; note = phosphorothioate bond
  modified_base 109^110: mod_base = OTHER; note = phosphorothioate bond
tttagcgaatggcctcctgcaggttgagaatcgaaagattcttaataaggcatccttccgatgctgacttctcaccgtccgttttccaataggagcgggcggtatgtttt

SEQ ID NO: 1484 - DNA, 22 bp, synthetic construct
  source 1..22: mol_type = other DNA
actattaaaccaagaaactccc

SEQ ID NO: 1485 - DNA, 22 bp, synthetic construct
  source 1..22: mol_type = other DNA
cgaaacatgggaaaactacgaa

SEQ ID NO: 1486 - DNA, 22 bp, synthetic construct
  source 1..22: mol_type = other DNA
agtaattgcatccagagtggat

SEQ ID NO: 1487 - DNA, 22 bp, synthetic construct
  source 1..22: mol_type = other DNA
aagagaagacagcccttcaaca

SEQ ID NO: 1488 - DNA, 22 bp, synthetic construct
  source 1..22: mol_type = other DNA
tttagcgaatggcctcctgcag

SEQ ID NO: 1489 - RNA, 110 nt, synthetic construct
  source 1..110: mol_type = other RNA
  modified_base 1: mod_base = OTHER; note = 2'-O-Methyladenosine
  modified_base 2: mod_base = cm
  modified_base 3: mod_base = cm
  modified_base 108: mod_base = um
  modified_base 109: mod_base = um
  modified_base 110: mod_base = um
  modified_base 1^2: mod_base = OTHER; note = phosphorothioate bond
  modified_base 2^3: mod_base = OTHER; note = phosphorothioate bond
  modified_base 3^4: mod_base = OTHER; note = phosphorothioate bond
  modified_base 107^108: mod_base = OTHER; note = phosphorothioate bond
  modified_base 108^109: mod_base = OTHER; note = phosphorothioate bond
  modified_base 109^110: mod_base = OTHER; note = phosphorothioate bond
accagttaaaagatcctcggtcgttgagaatcgaaagattcttaataaggcatccttccgatgctgacttctcaccgtccgttttccaataggagcgggcggtatgtttt

SEQ ID NO: 1490 - RNA, 110 nt, synthetic construct
  source 1..110: mol_type = other RNA
  modified_base 1: mod_base = um
  modified_base 2: mod_base = um
  modified_base 3: mod_base = cm
  modified_base 108: mod_base = um
  modified_base 109: mod_base = um
  modified_base 110: mod_base = um
  modified_base 1^2: mod_base = OTHER; note = phosphorothioate bond
  modified_base 2^3: mod_base = OTHER; note = phosphorothioate bond
  modified_base 3^4: mod_base = OTHER; note = phosphorothioate bond
  modified_base 107^108: mod_base = OTHER; note = phosphorothioate bond
  modified_base 108^109: mod_base = OTHER; note = phosphorothioate bond
  modified_base 109^110: mod_base = OTHER; note = phosphorothioate bond
ttcacaatcccacctggatctcgttgagaatcgaaagattcttaataaggcatccttccgatgctgacttctcaccgtccgttttccaataggagcgggcggtatgtttt

SEQ ID NO: 1491 - DNA, 22 bp, synthetic construct
  source 1..22: mol_type = other DNA
accagttaaaagatcctcggtc

SEQ ID NO: 1492 - DNA, 22 bp, synthetic construct
  source 1..22: mol_type = other DNA
ttcacaatcccacctggatctc

SEQ ID NO: 1493 - DNA, 38 bp, synthetic construct
  source 1..38: mol_type = other DNA
gctcttccgatctnnnnntgcgcacacacgtagactct

SEQ ID NO: 1494 - DNA, 38 bp, synthetic construct
  source 1..38: mol_type = other DNA
gctcttccgatctnnnnntgagctcaagagcaacccta

SEQ ID NO: 1495 - DNA, 38 bp, synthetic construct
  source 1..38: mol_type = other DNA
gctcttccgatctnnnnntctagcctgaatctcctgga

SEQ ID NO: 1496 - DNA, 38 bp, synthetic construct
  source 1..38: mol_type = other DNA
gctcttccgatctnnnnncaactgcacattaggggaca

SEQ ID NO: 1497 - DNA, 38 bp, synthetic construct
  source 1..38: mol_type = other DNA
gctcttccgatctnnnnntcatgtgcatggatctgcag

SEQ ID NO: 1498 - DNA, 38 bp, synthetic construct; identical to SEQ ID NO: 1495
  source 1..38: mol_type = other DNA

SEQ ID NO: 1499 - DNA, 38 bp, synthetic construct; identical to SEQ ID NO: 1493
  source 1..38: mol_type = other DNA

SEQ ID NO: 1500 - DNA, 38 bp, synthetic construct; identical to SEQ ID NO: 1494
  source 1..38: mol_type = other DNA

SEQ ID NO: 1501 - DNA, 38 bp, synthetic construct; identical to SEQ ID NO: 1496
  source 1..38: mol_type = other DNA

SEQ ID NO: 1502 - DNA, 38 bp, synthetic construct; identical to SEQ ID NO: 1497
  source 1..38: mol_type = other DNA

SEQ ID NO: 1503 - DNA, 38 bp, synthetic construct
  source 1..38: mol_type = other DNA
gctcttccgatctnnnnnatggaaagaggatgtggagc

SEQ ID NO: 1504 - DNA, 38 bp, synthetic construct
  source 1..38: mol_type = other DNA
gctcttccgatctnnnnnagaagctgcaggagctgcaa

SEQ ID NO: 1505 - DNA, 38 bp, synthetic construct; identical to SEQ ID NO: 1495
  source 1..38: mol_type = other DNA

SEQ ID NO: 1506 - DNA, 38 bp, synthetic construct
  source 1..38: mol_type = other DNA
gctcttccgatctnnnnnaagaggatgtggagctctac

SEQ ID NO: 1507 - DNA, 38 bp, synthetic construct; identical to SEQ ID NO: 1493
  source 1..38: mol_type = other DNA

SEQ ID NO: 1508 - DNA, 38 bp, synthetic construct
  source 1..38: mol_type = other DNA
gctcttccgatctnnnnncacgtatggcagcaagatga

SEQ ID NO: 1509 - DNA, 38 bp, synthetic construct
  source 1..38: mol_type = other DNA
gctcttccgatctnnnnngcacagagaacagaattccc

SEQ ID NO: 1510 - DNA, 38 bp, synthetic construct; identical to SEQ ID NO: 1493
  source 1..38: mol_type = other DNA

SEQ ID NO: 1511 - DNA, 38 bp, synthetic construct
  source 1..38: mol_type = other DNA
gctcttccgatctnnnnnttgaacgagtaccacaccag

SEQ ID NO: 1512 - DNA, 38 bp, synthetic construct; identical to SEQ ID NO: 1506
  source 1..38: mol_type = other DNA

SEQ ID NO: 1513 - DNA, 38 bp, synthetic construct
  source 1..38: mol_type = other DNA
gctcttccgatctnnnnnggacttctgggataacctgg

SEQ ID NO: 1514 - DNA, 38 bp, synthetic construct; identical to SEQ ID NO: 1496
  source 1..38: mol_type = other DNA

SEQ ID NO: 1515 - DNA, 38 bp, synthetic construct; identical to SEQ ID NO: 1495
  source 1..38: mol_type = other DNA

SEQ ID NO: 1516 - DNA, 38 bp, synthetic construct; identical to SEQ ID NO: 1494
  source 1..38: mol_type = other DNA

SEQ ID NO: 1517 - DNA, 39 bp, synthetic construct
  source 1..39: mol_type = other DNA
gctcttccgatctnnnnnctgtcaattctagaccttcct

SEQ ID NO: 1518 - DNA, 38 bp, synthetic construct
  source 1..38: mol_type = other DNA
gctcttccgatctnnnnngggtgatttttcctccgtca

SEQ ID NO: 1519 - DNA, 38 bp, synthetic construct
  source 1..38: mol_type = other DNA
gctcttccgatctnnnnnaagtcaagaggtccaggtct

SEQ ID NO: 1520 - DNA, 39 bp, synthetic construct
  source 1..39: mol_type = other DNA
gctcttccgatctnnnnncaaagaagaggaaaaggagct

SEQ ID NO: 1521 - DNA, 38 bp, synthetic construct
  source 1..38: mol_type = other DNA
gctcttccgatctnnnnnccagagtggatccagacctt

SEQ ID NO: 1522 - DNA, 38 bp, synthetic construct
  source 1..38: mol_type = other DNA
gctcttccgatctnnnnnggcatctgagttctgaccta

SEQ ID NO: 1523 - DNA, 38 bp, synthetic construct
  source 1..38: mol_type = other DNA
gctcttccgatctnnnnnaggtctgcaagactgacaga

SEQ ID NO: 1524 - DNA, 38 bp, synthetic construct
  source 1..38: mol_type = other DNA
gctcttccgatctnnnnnctggccttgtcgatcacact

SEQ ID NO: 1525 - DNA, 38 bp, synthetic construct
  source 1..38: mol_type = other DNA
gctcttccgatctnnnnntgtaagaaagccaatgcggg

SEQ ID NO: 1526 - DNA, 38 bp, synthetic construct
  source 1..38: mol_type = other DNA
gctcttccgatctnnnnngtagagctccacatcctctt

SEQ ID NO: 1527 - DNA, 38 bp, synthetic construct
  source 1..38: mol_type = other DNA
gctcttccgatctnnnnnccttgttcatctcctgtctc

SEQ ID NO: 1528 - DNA, 38 bp, synthetic construct
  source 1..38: mol_type = other DNA
gctcttccgatctnnnnntagggctgcaccttctgttt

SEQ ID NO: 1529 - DNA, 38 bp, synthetic construct; identical to SEQ ID NO: 1526
  source 1..38: mol_type = other DNA

SEQ ID NO: 1530 - DNA, 38 bp, synthetic construct; identical to SEQ ID NO: 1524
  source 1..38: mol_type = other DNA

SEQ ID NO: 1531 - DNA, 38 bp, synthetic construct; identical to SEQ ID NO: 1525
  source 1..38: mol_type = other DNA

SEQ ID NO: 1532 - DNA, 38 bp, synthetic construct; identical to SEQ ID NO: 1527
  source 1..38: mol_type = other DNA

SEQ ID NO: 1533 - DNA, 38 bp, synthetic construct; identical to SEQ ID NO: 1528
  source 1..38: mol_type = other DNA

SEQ ID NO: 1534 - DNA, 38 bp, synthetic construct
  source 1..38: mol_type = other DNA
gctcttccgatctnnnnngttcaaggtagggttgctct

SEQ ID NO: 1535 - DNA, 38 bp, synthetic construct
  source 1..38: mol_type = other DNA
gctcttccgatctnnnnnatcagactatggcgcaggtc

SEQ ID NO: 1536 - DNA, 38 bp, synthetic construct; identical to SEQ ID NO: 1526
  source 1..38: mol_type = other DNA

SEQ ID NO: 1537 - DNA, 38 bp, synthetic construct
  source 1..38: mol_type = other DNA
gctcttccgatctnnnnngtgtggtactcgttcaaggt

SEQ ID NO: 1538 - DNA, 38 bp, synthetic construct; identical to SEQ ID NO: 1524
  source 1..38: mol_type = other DNA

SEQ ID NO: 1539 - DNA, 38 bp, synthetic construct
  source 1..38: mol_type = other DNA
gctcttccgatctnnnnncagctcagttccagcatctt

SEQ ID NO: 1540 - DNA, 38 bp, synthetic construct
  source 1..38: mol_type = other DNA
gctcttccgatctnnnnncacgctaggtctttccttac

SEQ ID NO: 1541 - DNA, 38 bp, synthetic construct; identical to SEQ ID NO: 1524
  source 1..38: mol_type = other DNA

SEQ ID NO: 1542 - DNA, 38 bp, synthetic construct
  source 1..38: mol_type = other DNA
gctcttccgatctnnnnngtcccccaaagaaagaagct

SEQ ID NO: 1543 - DNA, 38 bp, synthetic construct; identical to SEQ ID NO: 1537
  source 1..38: mol_type = other DNA

SEQ ID NO: 1544 - DNA, 38 bp, synthetic construct
  source 1..38: mol_type = other DNA
gctcttccgatctnnnnncatgcggtcgcgaaattcct

SEQ ID NO: 1545 - DNA, 38 bp, synthetic construct; identical to SEQ ID NO: 1527
  source 1..38: mol_type = other DNA

SEQ ID NO: 1546 - DNA, 38 bp, synthetic construct; identical to SEQ ID NO: 1526
  source 1..38: mol_type = other DNA

SEQ ID NO: 1547 - DNA, 38 bp, synthetic construct; identical to SEQ ID NO: 1525
  source 1..38: mol_type = other DNA

SEQ ID NO: 1548 - DNA, 39 bp, synthetic construct
  source 1..39: mol_type = other DNA
gctcttccgatctnnnnntctgtgagttgataacaggct

SEQ ID NO: 1549 - DNA, 38 bp, synthetic construct
  source 1..38: mol_type = other DNA
gctcttccgatctnnnnnaacccctaaagggctgtgat

SEQ ID NO: 1550 - DNA, 38 bp, synthetic construct
  source 1..38: mol_type = other DNA
gctcttccgatctnnnnnctttaagtccatgacccagc

SEQ ID NO: 1551 - DNA, 39 bp, synthetic construct
  source 1..39: mol_type = other DNA
gctcttccgatctnnnnncagagtgctgtgatttctact

SEQ ID NO: 1552 - DNA, 39 bp, synthetic construct
  source 1..39: mol_type = other DNA
gctcttccgatctnnnnncttagctccttttcctcttct

SEQ ID NO: 1553 - DNA, 38 bp, synthetic construct
  source 1..38: mol_type = other DNA
gctcttccgatctnnnnncccattgctcttggaatcca

SEQ ID NO: 1554 - DNA, 38 bp, synthetic construct
  source 1..38: mol_type = other DNA
gctcttccgatctnnnnncccctgccgttttttgtgaa

SEQ ID NO: 1555 - DNA, 2803 bp, synthetic construct
  source 1..2803: mol_type = other DNA
aaaaaaaaaaaaaaaaaaaaaaaaaaaaaaaaaaaaaaaaaaaaaaaaaaaaaaaaaaaaaaaaaaaaaaaaaaaaaaaaaaaaaaaaaaaaaaaaaaaagaagagcaagtcccgaattcactggccgtcgttttacaacgtcgtgactgggaaaaccctggcgttacccaacttaatcgccttgcagcacatccccctttcgccagctggcgtaatagcgaagaggcccgcaccgatcgcccttcccaacagttgcgcagcctgaatggcgaatggcgcctgatgcggtattttctccttacgcatctgtgcggtatttcacaccgcatatggtgcactctcagtacaatctgctctgatgccgcatagttaagccagccccgacacccgccaacacccgctgacgcgccctgacgggcttgtctgctcccggcatccgcttacagacaagctgtgaccgtctccgggagctgcatgtgtcagaggttttcaccgtcatcaccgaaacgcgcgagacgaaagggcctcgtgatacgcctatttttataggttaatgtcatgataataatggtttcttagacgtcaggtggcacttttcggggaaatgtgcgcggaacccctatttgtttatttttctaaatacattcaaatatgtatccgctcatgagacaataaccctgataaatgcttcaataatattgaaaaaggaagagtatgagtattcaacatttccgtgtcgcccttattcccttttttgcggcattttgccttcctgtttttgctcacccagaaacgctggtgaaagtaaaagatgctgaagatcagttgggtgcacgagtgggttacatcgaactggatctcaacagcggtaagatccttgagagttttcgccccgaagaacgttttccaatgatgagcacttttaaagttctgctatgtggcgcggtattatcccgtattgacgccgggcaagagcaactcggtcgccgcatacactattctcagaatgacttggttgagtactcaccagtcacagaaaagcatcttacggatggcatgacagtaagagaattatgcagtgctgccataaccatgagtgataacactgcggccaacttacttctgacaacgatcggaggaccgaaggagctaaccgcttttttgcacaacatgggggatcatgtaactcgccttgatcgttgggaaccggagctgaatgaagccataccaaacgacgagcgtgacaccacgatgcctgtagcaatggcaacaacgttgcgcaaactattaactggcgaactacttactctagcttcccggcaacaattaatagactggatggaggcggataaagttgcaggaccacttctgcgctcggcccttccggctggctggtttattgctgataaatctggagccggtgagcgtgggtctcgcggtatcattgcagcactggggccagatggtaagccctcccgtatcgtagttatctacacgacggggagtcaggcaactatggatgaacgaaatagacagatcgctgagataggtgcctcactgattaagcattggtaactgtcagaccaagtttactcatatatactttagattgatttaaaacttcatttttaatttaaaaggatctaggtgaagatcctttttgataatctcatgaccaaaatcccttaacgtgagttttcgttccactgagcgtcagaccccgtagaaaagatcaaaggatcttcttgagatcctttttttctgcgcgtaatctgctgcttgcaaacaaaaaaaccaccgctaccagcggtggtttgtttgccggatcaagagctaccaactctttttccgaaggtaactggcttcagcagagcgcagataccaaatactgttcttctagtgtagccgtagttaggccaccacttcaagaactctgtagcaccgcctacatacctcgctctgctaatcctgttaccagtggctgctgccagtggcgataagtcgtgtcttaccgggttggactcaagacgatagttaccggataaggcgcagcggtcgggctgaacggggggttcgtgcacacagcccagcttggagcgaacgacctacaccgaactgagatacctacagcgtgagctatgagaaagcgccacgcttcccgaagggagaaaggcggacaggtatccggtaagcggcagggtcggaacaggagagcgcacgagggagcttccagggggaaacgcctggtatctttatagtcctgtcgggtttcgccacctctgacttgagcgtcgatttttgtgatgctcgtcaggggggcggagcctatggaaaaacgccagcaacgcggcctttttacggttcctggccttttgctggccttttgctcacatgttctttcctgcgttatcccctgattctgtggataaccgtattaccgcctttgagtgagctgataccgctcgccgcagccgaacgaccgagcgcagcgagtcagtgagcgaggaagcggaagagcgcccaatacgcaaaccgcctctccccgcgcgttggccgattcattaatgcagctggcacgacaggtttcccgactggaaagcgggcagtgagcgcaacgcaattaatgtgagttagctcactcattaggcaccccaggctttacactttatgcttccggctcgtatgttgtgtggaattgtgagcggataacaatttcacacaggaaacagctatgaccatgattacgccaagcttgcatgcctgcaggtcgactctagaggatcccttgaagactaaaaaaaa

SEQ ID NO: 1556 - protein, 156 aa, unidentified
MDADDERWMRIALDEADSARAKGEVPVGCAIVSLTGELLASGHNLAETLEDPTAHAEIVAMRIAARKLDTWRLESTTLYSTFEPCVMCAGAMVNARVGRVVYGVLNSKTGAVTTLFNIGNYTRLNHRFPVTGGVLADDCAERLCRFYSAPRAVFNK

SEQ ID NO: 1557 - protein, 148 aa, unidentified
MRAALAEADAARAIGEVPVGCVLVGLDGAELARGHNLAEALQDPTAHAEMIAVRAAAAKIGSFRLEGVTAYSTFEPCPMCAGALVHARVAHVVYGVDNSKTGAVTSLYNVGNYGKMNHTFTLTRGVLADESAARLCTFYAGPRAVFNK

SEQ ID NO: 1558 - protein, 156 aa, unidentified
MDVTQDVAFMLEALAEADRAREIGEVPVGAVMVLGNAIVARGHNLAESLADPTAHAEMIAIRECAKTRGDWRLDDATLYSTFEPCPMCAGALVHARVKRVVYGVDNSKTGAVKTLFNIGNYPRLNHRFELTSGVRAEECASKLCAFYQRPRAVFNK

SEQ ID NO: 1559 - protein, 175 aa, unidentified
MSTAASFPLPAESAEPPATPALTVAPEHVAYMRQALEAAEAARQRGEVPVGAVVVLGGAVIAVAHNEAETLNDPTAHAEVLALRRAAAALGSWRLTEADLYSTFEPCPMCAGAIVNARVRRVYYGVDNSKTGAVRSLYNILNYRRLNHRVEVVPGVLSVEAAGLLCAFYGRPRRV

SEQ ID NO: 1560 - protein, 168 aa, unidentified
MSVTRTAELPLDATPEAVAVDELHMRTALAAAERARLSGEVPVGAVVVLRGEVIAVAHNQAETLNDPTAHAEIVALRAAAAALNSWRLVDADLYSTFEPCPMCAGAIVNARVRRVIYGVDNSKTGAVRTLFNLLNYQRLNHRVEVVSGVLAAESSALLCSFYSRPRLV

SEQ ID NO: 1561 - protein, 178 aa, unidentified
MTTAAAAEPLSSSTLAEGGSSVGERELSFMRRALAAAELARGRGEVPVGAVVVLGDEVVAIAHNEAETLGDPTAHAEILALRRAAAALGRWRLTDADLYSTFEPCPMCAQAISFARLRRLYFGVDNSKTGAVRTLYNLVNYSRLNHRVEVFPNVLAAEGAALLCGFYSRPRQVFNRER

SEQ ID NO: 1562 - protein, 162 aa, unidentified
MKKDRVFMAEAMALADRARELGEIPVGAVIVLKGRVIARAFNRAEALQDPTAHAELIAIRRAAEALGEWRLSECTLFSTFEPCPMCAGTIVNSRVGRVVYGVPNSKTGAVRSVYNMLNYPRLNHRCAVARTMAAECSEQLCAFYVAPREVFNAQKKAQSSIN

SEQ ID NO: 1563 - protein, 166 aa, unidentified
MLTSDQEYMNLALELGLQARREGDIPVGALVVLPCGEIIGRGRNRARILHDPTAHAEVVALREAARNLGVWNLNGCSLYSTFEPCPMCAGALVQARVSRLVYGVTNSKRGACGTLYNLTNYTRLFHRLQVVPGVMEQECRALLCDFYRECREVFNTFGRLLDGRNN

SEQ ID NO: 1564 - protein, 158 aa, unidentified
MTDDERFMGYALARAEAARARGDVPVGAVVVLDGAVVGVGENRAEILADPTGHAEIVALRDACRSAGRWRIDGATLYSTFEPCPMCAGAIVNARVARLVYGVDNSKRGAVRSLYNICNYPRLNHRVELCPGVLAEPAAGLLCDFYRRARAVFNLGQGV

SEQ ID NO: 1565 - protein, 166 aa, unidentified
MGDSDPTAADLSFMDAALDLARRARDAGDVPVGALVVLDGRIVGIGGNRAEVLADPSGHAEIVALRDAGKSVGRWRVDGATLYSTFEPCPMCAGAIVSARVARLVYGVDNSKRGAVRTLYNICNYPRLNHRVEVVAGVRAEESRALLCDFYAQARQVFNPRPGGAR

SEQ ID NO: 1566 - protein, 177 aa, unidentified
MAADLEYMRLALELAAEARERGDVPVGALVVLEGRILGTGFNTAERLHDPTGHAEVVAMREACRQARRWRLDGATLYSTFEPCPMCAGALINTRIARLVYGVHNSKRGAVRSLYNLCNYPRLNHRIEVVGGILAEDGAAQLCQFYRAPRAVFNRERAAGNEAPRWERGEQERRGDQE

SEQ ID NO: 1567 - protein, 156 aa, unidentified
MSHSDELFMEEALREAQRARALGEVPVGAVVVLDGHIVGRGCNRAVTLHDPTAHAEIQALREAGHVVGNYRLNDCDLYSTFEPCAMCAGAITHARIRRLIYGVENSKTGAVHSMLNVLNYPKLNHQVEVTCGVLAARCMDLLCTFYRTPRTTAENH

SEQ ID NO: 1568 - protein, 169 aa, unidentified
MLIASHCISLFAMSLSDEFWMEEALREAQRARALGEVPVGAVVVLDGRIVGRGCNRALSLNDPTAHAEILALREAGTTIGNYRLLDCDLYSTFEPCPMCAGAITHARVRRLVYGVENSKTGAVRSMLNVLNYPQLNHKVEVTSGVLAARCMQLVCSFYREPRAVFNNNR

SEQ ID NO: 1569 - protein, 142 aa, unidentified
MEEALREAGRARHAGEVPVGTVIVLENKIVGRGFNRAISLADPTAHAEVIALREAGKNLGNYRLRGCELFSTFEPCAMCAGAMVHARIKRLIYGVDNSKTGAVKSVMNVINYADLNHRMEVVGGVLAGRSSQLLCEFYRSPR

SEQ ID NO: 1570 - protein, 155 aa, unidentified
MADPVTEQSDELWMEEAIRCAQRAREIGEVPVGAVVVLDGRVVGRGWNRALALNDPTAHAEIVALRDAGATIGNHRLVDCELFSTFEPCTMCAGALVHARIRRLVYGVYNSKTGAVRSVLNVLNYPQLNHRMDVRGGVLAGRSAEILCEFYKKPR

SEQ ID NO: 1571 - protein, 174 aa, unidentified
MSGSKPRARPPARQSSQAVPESHPQNPPDELWMEEALRCAQRAREANEVPVGAVVVLDGQIVGRGWNRAITLSDPTAHAEIIALREAGATVGNYRLEHSELFSTFEPCAMCAGALTHARVRRLVYGVDNSKTGAVRSVMNTLNYPQLNHKVEVRGGVLAGRSAELLCSFYRSPR

SEQ ID NO: 1572 - protein, 142 aa, unidentified
MEEALRCAQRARESGEVPVGAVVVLAGRIIGRGWNRAIGLFDPTAHAEIAALREAGATLGNHRLGDCDLFSTFEPCAMCAGAMTHARIRRLVYGVENSKTGAVRSVMNVLNYKHSNHRIEVRSGVLAGRSAELLCTFYRNPR

SEQ ID NO: 1573 - protein, 157 aa, unidentified
MMSPDEQWMEVALQQAAEARRLGEVPIGAVVVLDGAIVGRGANRALNLADPTAHAEVVALREAARTLGTQRLVACEMFSTFEPCAMCAGALTHARIRRLVYGVDNSKTGAVHSVMNVLNYPQLNHKMEVLGGVLQERCGELVCDFYRSPRAESKIKS

SEQ ID NO: 1574 - protein, 155 aa, unidentified
MEPTDELWMAEAIREAHLARAGGEVPVGAIIVLGGRIAGRGGNRAIRLSDPTAHAEIIALREAGHHMGNHRLPDCVMYSTFEPCAMCAGALMHARLARLVYGVDNSKTGGVHSVTNVLNYPRLNHHMQVTSGVLAARSSDLLCAFYREPRVKTAE

SEQ ID NO: 1575 - protein, 167 aa, unidentified
MSFNVLTQHHFSSDDEKWMRLALEQASFARMQGEIPVGAVIVLQNQVIGVGYNAAITSQDPTAHAEIVALRDACARIQNYRLPDDAVLYSTLEPCTMCVGALIHARIHKVIFAVYNSKRGSLLSARNLLNYNGYYNHVFEYQDGCLQQEASALLCTFYKKPRAEKKQ

SEQ ID NO: 1576 - protein, 178 aa, unidentified
MAVLTNPMTGADETDDYWMNRALALAAQARESGEVPVGAVIVLDGREVGAGFNGAIGQCDPTAHAEIRAIRDAGARAGNYRLPGATLYSTLEPCTMCVGAIVHARISRLVFGVLNSKRGAVESVRNTLNYDHFNWQVAVTGGVMASQCKDIICRFYADPREKHRLRKQKSSGINQQPL

SEQ ID NO: 1577 - protein, 167 aa, unidentified
MSELPKNDEYWMARALVLAERARSIGEVPVGAIVVLHGQELGVGYNAAITGCDPTAHAEIRALRDASARAGNYRLTGATLYSTLEPCTMCVGAIVHSRISRLVYGVRNSKRGAVESARNTLNYAHLNWQVDAEGGVLEGECGQIICDFYSRPRAEIRRRRKQNSGIN

SEQ ID NO: 1578 - protein, 167 aa, unidentified
MSEVTAEDEYWMNRALQLAGEARAKGEVPVGAVVVLDGGEIGAGFNAAISGCDPTAHAEIRALRDAAARVGNDRLPHATLYSALEPCTMCVGAIVHGRISRLVYGVSNSKRGAIESARNTLNYPHLNWGVTAVGGVLSDQCSQVICEFYSRPRAEIRRLRKQNSGIN

SEQ ID NO: 1579 - protein, 167 aa, unidentified
MPDISDDRHWMSRALQLAQQARAAGEVPVGAIVVLDGQEVGAGFNAAISACDPTAHAEIRALRDAAARVGNYRLSGATLYSTLEPCTMCVGAIVHGRISRLVYGVTNSKRGAVESARNTLNYPHLNWAVEATGGVLEQQCSEIICEFYSRPRAEIRRQRQSSSPGIN

SEQ ID NO: 1580 - protein, 179 aa, unidentified
METTSVMTPDVDDERWMRAALALAERARALGEVPVGAVVVLDGEVIGEGWNQAISGQDPTAHADIMALRDAARRVGNYRLVDADLYSTIEPCTMCAGAIVHARIRRVVFGVSNSKRGALISRQNLLNYPWLNHRVSWTGGVLAEHCSERICAFYRAPREERRRQRQLQSPSINGGSGLG

SEQ ID NO: 1581 - protein, 158 aa, unidentified
MQEALLEAAKARALSEIPVGAVVVLEGEIIGRGYNCAISSVDPTAHAEIQALRDAASRVGNYRLPGATLYSTLEPCSMCAGAIVHSRVERVVFAVTNSKRGVVESQGNFFNYPFLNHKVQCCGGVLQEAASQQICQFYQYPREQKKRLKRLSSPSINE

SEQ ID NO: 1582 - protein, 164 aa, unidentified
MPAVTGIAVSPMSEARWMEEALALAEQARALGEVPVGAVIVLGGGVIGRGFNRAISSSDPTAHAEIEAIRDAARTVGNYRLPESEMYSTIEPCTMCTGALVHARIARLIYGVPNSRRGAVCSQSNLLNYGHFNHRVSYEGGLLEARCAALLCRFYQAPRAARQP

SEQ ID NO: 1583 - protein, 155 aa, unidentified
MPHSDEHWMRQALARARQGRATGEVPVGAVIVLNDTVIGEGWNQAITSADPTAHAEIVALRSAAQQQHNYRLPDATIYSTIEPCTMCAGALIHSRIKRLVFGVPNSRRGAVCSHFNLLNYEGIYNHRVAWEQGVLAEDCAQLICSFYQAPRKPVE

SEQ ID NO: 1584 - protein, 155 aa, unidentified
MQQHSTDQHWMRLALELADRARAEGEVPVGAVLVLAGELLGSGYNRAIGACDPSAHAEINALRAAALAESNYRLAGATLYSTLEPCTMCVGALVHARVARLVFAVRNSKRGMVCSNANLLNYPHYNHRVQWQEGVLAAESAARLCAFYRAPRQSG

SEQ ID NO: 1585 - protein, 166 aa, unidentified
MGKVQIIDRSQDARFMRLALELAARGRALGEVPVGAVLVLDGEVVGEGFNCAISAHDPSAHAEMVAIRAAAKAAGNYRLPGSTLYSTLEPCSMCAGLIVHARISRVVYAVSNSKRGVVISRGNFFNYDFLNHRVLAEGGVLAQESAELLCGFYQAPRRGASQPVSG

SEQ ID NO: 1586 - protein, 162 aa, unidentified
MSPASSAIEEQEQHESWMRLALEQAQLARAADEVPVGAVLVLDRVLVAAGHNQAIGACDPTAHAEIVTLRKAAQAAENYRLPGSVLYSTIEPCTLCLGAIIHARVDTLVFAVRNSRRGAVVSRQNLGNYQYFNHQPAVIEGVLAIDSAALMCAFYAGPRSGQ

SEQ ID NO: 1587 - protein, 153 aa, unidentified
MDTTSHAHWMALALERAREARRQDEVPVGALLVLGGEALGEGSNRAVSSHDPTAHAEIIALREAARREGNYRLPGSVLYSTIEPCTMCVGAIIHARIDLLVFGVRNSRRGAVVSARNLLNYDRYNHHPAVLEGVLADECGDLMCGFYRAPRNR

SEQ ID NO: 1588 - protein, 173 aa, unidentified
MISDDAGELDDIAAMRLALEQARLARGEGEVPGGAGVVLEGKVIGTGYNGAIGGLDPSAHAEMRAIRQACLTVGNYRLPGATLYSTVEPCTMCAGLLVHSRISRLVYGVANSKRGAVVSNLNLLNYGPYNHRIEVAGGVLADECSALMCEFYARPRARKKALKQSTINAKPAS

SEQ ID NO: 1589 - protein, 157 aa, unidentified
MIRSDEFYMHRALDQAHLARVEGEVPVGAVVVDLQGTIIGAGRNSAVASCDPSGHAEIRALREAGQQLGNYRLEGCTLFSTLEPCMMCAGAMVHARLARLVYGVANSRRGMVESKANLLNYPWFNHQVAVTRGVLAAPAKKLLCQFYATPRESITQR

SEQ ID NO: 1590 - protein, 158 aa, unidentified
MPDLDDGYWMQQALKLAAQARDQGEVPVGALVVLEQKLLGQGYNQAISLQDPSAHAEVMALRGAGITQQNYRLVNTTLYSTFEPCMMCAGVLVHARIKRLVFGVYNSKRGAISSCANLLNYPHLNHQILVQGGILAKECGQQLCDFYKAPRQVFNDKG

SEQ ID NO: 1591 - protein, 164 aa, unidentified
MREEKDLIFMKKALHLAEEARRQGEVPVGAVVVDLEGQIIGQGYNQAIALLDPTAHAEIVALRQAAKKKKNYRLSGSTLYSTFEPCPMCLGAMVQARIDRLVFGVYNSKRGAVSSIMNFNYDKMNHRFEIEGGLLSQECATILCEFYQSPRGVFNNKKETAKIN

SEQ ID NO: 1592 - protein, 153 aa, unidentified
MRLAMDMAKEARSIGEVPVGCVIADLDGNVISTGYNRAITLNDPSAHAEMVAIRNAGSLLKNYRMPGLSLYSTFEPCCMCSGAIIHARIARVYYGVSNSKRGACGSVFNVMNYPRHNHSVECIGGILADECSKMLCDFYKEPRQVFNAEATKL

SEQ ID NO: 1593 - protein, 168 aa, unidentified
MEPMEEHRHFMGLAIEEAARARELNEVPVGAVLVGLAGEILSRASNAAIRLADPSAHAEMIALRQAARASGNYRLPGSVLYSTFEPCVMCVGAMLHARIATLVFGVRNSRRGAAGSVVNLTNYPAFNHYVRVIAGVRAEECSELLCRFYREPRRVFNSGYGGEVPKIN

SEQ ID NO: 1594 - protein, 158 aa, unidentified
MSLADRHEMFMQMALQQAQLARDCAEVPVGAVVVNLAGEVIGKGYNRAIILSDPTAHAEIVALRQAAAHEQNYRLPDLTVYSTFEPCVMCIGALTHARIAHVVYGVSNSKRGACGSVLNIQNYKKINHHTRITSGVLEQACAEKLCHFYREPRKVFNL

SEQ ID NO: 1595 - protein, 168 aa, unidentified
MDDQHWMGRALALAERAREQGEVPGGAVLVLENEIVGEGWSRAIALQDPSAHAEILALRDAGLRRGNYRLSGSVLYSTFEPCVMCAGAIVHARVDTLVFGVANSKRGACGSVFNLLPNYGRFNHHTQCRGPILADACGTILCAFYANPRAVFNARANASAAHERPEIN

SEQ ID NO: 1596 - protein, 191 aa, unidentified
MQKKVDDFLKIVEPPDAERRTKGKLLQQRAVDEQWMGLALQRGEEARRQGEVPVGAVVVLKDGFLTAAGNSAIGLADPSAHAEMLAIRAAAKLLGNYRLPEATLYSTFEPCIMCMGALIQARISRLVFGVANSKRGAAISVYNIGNYQRLNHTVAVTGGILAEACAQLLCNFYKKPRGVFNVINSPFLKIN

SEQ ID NO: 1597 - protein, 180 aa, unidentified
MTALITTSNIHDKMMSLALKEAFKARKLGEIPVGCVITDLNNELVATGFNRAIILNDPSAHAEIVALRKAGEKLQNYRLVNLNLYSTFEPCTMCSGAIIHARIKRVFFGVYNSKRGACGSVFNVLNYDRHNHKVEIYGGILKEECSSMLCDFYKAPRKVFNEGRDWIVESGKDRTWLNIN

SEQ ID NO: 1598 - protein, 205 aa, unidentified
MPEPFQGGDPADPARAAAEAQDLADRAFMRLALDQAHNARLLGEVPVGAVIVLEGRVLATGYNRAIGLSDPTAHAEIVALRQAASLLGNYRLPGCTLYSTFEPCAMCAMALLHARIERVVFGVSNSKRGAAGSVLNLFNYPLLNHHASLRAGVEAQACGALLCEFYREPRAVFNAQQQLPAHGGGIDVRHLDAPEPGDESDPFIN

SEQ ID NO: 1599 - protein, 167 aa, unidentified
MTDSQNDTDEYWMGEALKLAQKARDEGEVPVGAILVLKGEVIGHGWNRAIGLHDPSAHAEIMAIREAGVRIGNYRMLDTVLYSTFEPCAMCAGALVHGRISRLVFGVENSKRGACGSVMNIANYPALNHQLQVDGGVMAAPCARLLCDFYRWPRAQKKAARDNSSIN

SEQ ID NO: 1600 - protein, 159 aa, unidentified
MQPTDPFHLQHMELALEEAGLARAQDEVPIGAVIVLLEKGIIARAHNQAEMLQDPTAHAEMIAISHAAGALGSWRLEDTILYSTFEPCPMCAGAIVQARVPFVVYGVNNSKRGACHTLYNITNYPRLNHRCHVLGGVLSERCAAILCEFYAAPRRLGKK

SEQ ID NO: 1601 - protein, 171 aa, unidentified
MIDPFSPFDLTFTDPHHPFHLHHMELALEEAAAARREDEVPVGCVIILPERGIIASAHNQAEQLTDPTAHAEMIAITQAAASLKSWRLEQCILYSTFEPCPMCAGAIVQARIPVVAFGVTNSKRGACTTLYNIANYPRLNHRARIIGGIQAARCAAMLCNFYQRPRAMGKK

SEQ ID NO: 1602 - protein, 149 aa, unidentified
MLLALDQARIARAHDEVPIGAVLYLLPTRNIIGQAHNRAILLADPPAHAELLAIRQGAQTLGDWRLTDTILASTFEPCPMCAGAIVNARIPQLVYGVANSKRGAVQTLYNLCNYPRLNHRVQLTAGVRSDDCSALLCSFYAAPRAMGKK

SEQ ID NO: 1603 - protein, 165 aa, unidentified
MNGPRAHEIDDRMMGAALDAARAARSIGEVPIGAVVYLGEDVLGTGHNRAETLADPSAHAEVLAIRAAAHAIGDWRLEGCSIASTFEPCPMCAGLIVNARLERLVYAVANPKAGAVETLYNLCNYARLNHRASEIRAGVREAEAAGLLCGFFRDPRAVFNGPPDA

SEQ ID NO: 1604 - protein, 147 aa, unidentified
MMRRALDLAAAAREEGEVPVGAVIYDTLTGETLGEAANRAEALRDPSAHAEFTAIRRACSKINDFRLNRCSLASTFEPCPMCAGLIVNARVGRVVYGVDNPKAGAVRSLYNILNYARLNHRCEVIPGVLADESADLLCSFFRGPRAR

SEQ ID NO: 1605 - protein, 172 aa, unidentified
MLARLKNLFTKPKQANDATEIDDRMMVRALELARDARGAGEVPVGAVVYVNLTGEIIGEGANRAETLNDPSAHAEHIAIVRAAERLGDWRLNHCTVVSTFEPCAMCAGLIVNARLGRVVYGVDNPKAGACRSLFNIANYPRLNHRAQIIAGVRHDECAQVLCTFFRGPRAKG

SEQ ID NO: 1606 - protein, 167 aa, unidentified
MRQPEPPQPTTTDIEMMERAIELAQQSRDAGEVPVGAIVYNTLTGEIVAQAHNTADMLNNPAGHAEFSAIQSACNSIGDWRLNDCTLVSTFEPCPMCAGLIVNARVGRLIYGVSNPKAGAVRSLFNLCNYTRLNHRCEIHTGVLGDRCSDQLCTFFRDPRAVFNSNG

SEQ ID NO: 1607 - protein, 161 aa, unidentified
MTADPAKVCARDEQAMSRAIELAREARAMGEVPVGAVVYRTLTGETLGEGYNRAETLDDPTAHAEILAIRQAATKIGDWRLNECTLVSTFEPCVMCAGAIVNARVGRLVYGVINPKAGGVESLYNIPNYNRLNHRPTILPGLMAEACGELLCAFFRSPRGK

SEQ ID NO: 1608 - protein, 180 aa, unidentified
MVGWLSRVLGMRRGAAAPGAPASATSTDVNMMGRALELARQARAIGEVPVGAVVYETLSGRILGEGFNRAEILHDPAAHAELTAIRAAAAARGDWRLNDCTLVSTFEPCAMCSGLIVNARIGRLVYGVANAKAGATESLYNLTNYPRLNHRVEPVAGVMAEECGALLCEFFRGPRAVFNR

SEQ ID NO: 1609 - protein, 162 aa, unidentified
MTAGAPTDLDRAMMRRALDRARDARAMDETPVGAVVYETLTGRILAEAHNRAEALDDPTAHAELIAIRHAARAVGDWRLNDCTLVSTFEPCAMCAGAIVNARVGRLVYGVSNPKAGAVESLYNLCNYARLNHRIEPIGGVDAEECGGLLCEFFRAPRSVFND

SEQ ID NO: 1610 - protein, 168 aa, unidentified
MMAPPEQPAAPLPPTEATETDLAMMRRALDLARSAREAGESPVGAVVYETLTGRILAEAHNTAEALKDPCGHAELIAARAAAKALGDWRLNGCTLVSTFEPCAMCAGMIVNARFGRVVYGVSNPKAGAAESLYNLTNYARLNHRVRPVAGVLAGESAQMLCEFFRQPR

SEQ ID NO: 1611 - protein, 168 aa, unidentified
MADAVDEFDLTMMRRALAQAERARAMHEVPVGAVVYELLSRAVLAEAHNRAEILADPTAHAEMLALRAAARRRGLWRLDGCAIASTFEPCPMCAGALVNSRIDRLVYGVANPKMGCVETLYNLCNYERFNHRLEVRGGVLAEPCAAVLCEFFKAPRGVFNAPKPKPGT

SEQ ID NO: 1612 - protein, 152 aa, unidentified
MMARAIELAQHARSIGEVPVGAVVYLNTEVLGEGYNRAESLRDPTAHAEMLALRQAAEQRGSWRLEDCSLASTFEPCPMCAGAIVNARIARLVYGVANPKMGCVQTLHNLCNYQRFNHRVQLIACIEAERCGQLLCEFFQAPRNVFNKGKPS

SEQ ID NO: 1613 - protein, 180 aa, unidentified
MIRFRSDITRRNERIRARQRSWSATNHAMMGLALDLAGQARAIGEVPVGAVVVLRGRVVGEGFNRAESLADPTSHAEIEAIREAATALGDWRLSECTLYSTFEPCPMCAGAIVNARVGRLVYGVTNPKAGAVASLYNLCNYARLNHRVEVLGGVRARECGLVLCRFFRGPRRVFNASRRR

SEQ ID NO: 1614 - protein, 175 aa, unidentified
MHQVRLQTERHPDVTDVDIEMMQRAIKLAKKARTLGEVPVGAIVYLGSKVLAEGYNVAESLSDPTGHAELIAISKAGKALGDWRLTDCSLASTFEPCPMCAGALVNARLGRLIYGVANPKAGACHTLYNIPNYDRLNHRVAMIGGVMANECRALLCDFFQQPRQVFNDTRNARSA

SEQ ID NO: 1615 - protein, 175 aa, unidentified
MQQLKLVQSDSVRATEVDVDMMKRAIELANLARAMEEVPVGAVVYLGNKIIAEAHNNAEQLADPTGHAELLAIRLASEKLDSWRLNDCALASTFEPCPMCAGAIVNSRISRVVYGVTNPKAGACESLYNILNYDRLNHQVEMVSGVLASECSKLLCDFFKEPRKVFNERRLRNAS

SEQ ID NO: 1616 - protein, 172 aa, unidentified
MDLTDLDTRMMRLALEQARAARDAGEVPVGAVVYLGEEVLAKAHNMAEALADPTAHAELIALREAAKTIGTWRLDGCRLASTFEPCPMCAGALVNSRLEAVVYGVTNPNMGCVESLHNLLNYRAFNHRVSWQGGVLADASLALLCGFFKAPRGVFNPPKPTSQTGQADATRP

SEQ ID NO: 1617 - protein, 172 aa, unidentified
MTASTESLCLPDRRREEHYMRLALDQARQARKADEIPVGAVVVLGGRVIGRGFNSAIGLNDPTAHAEILALRESALTVDNYRLEEATVFSTFEPCVMCAGALVAARVRRLVFAVRNSRRGAVRSKFNLANYELLNHRVQVEEGLLAAECGDLVCAFYQRPRERPLPGLDGSA

SEQ ID NO: 1618 - protein, 148 aa, unidentified
MSGDVFMREALALACQARANGEVPVGAVVVLGGEVRGRGSNAAIRLNDPTAHAEMLAIREAAAAIGNYRLEGAILYSTFEPCVMCAGALVAARVGRLVFGVRNSRRGGGRSKFNLANYELLNHRLEIVEGVLAADCLALVCRFYEQPR

SEQ ID NO: 1619 - protein, 158 aa, unidentified
MSNYSGSAAAGDEAWMRRALGLARRAREEGESPVGAVIVGLDGRLLAEAHNAAIGLHDPTAHAEIVALRAAARALGNYRLNGTTMYSTFEPCVMCAGALVHARVKRLVFGVRNSRRGGVRSKFNLANYDLLNHRLEIEEGPMAAEATALLCEFYRAPR

SEQ ID NO: 1620 - protein, 150 aa, unidentified
MRQALAAAHEARERGEVPVGACIVLGDVILAVAGNRARTLSDPTAHAEIVALRNAAKSGNYRLTDARVYSTFEPCVMCAGALIQARVSRLVYGVRNSRRGAVESHFNVCNYDFLNHRIAVTAGVLEAECRELMCRFYRAPRGNQGMRAEG

SEQ ID NO: 1621 - protein, 165 aa, unidentified
MKAAEERENAAQWMRQAVAAAHGARERGEVPVGACIVLGETILAVAGNRAITLQDPSAHAEIVALREAARKIANYRLTNAVVYSTFEPCVMCAGALIQARVKRLVYGVRNSRRGAIESRFNVCNYDFLNHRIEVTAGVLENECREIMCEFYRAPRCGTAGAKLEG

SEQ ID NO: 1622 - protein, 153 aa, unidentified
MITTDIDEKWMRAAIEAARSARDLGEVPVGACLVDLGGNLLSIASNRAITLHDPSAHAEMLALREAAAKVENYRLTGVTAYSTFEPCVMCAGALVNARVARLVFGVHNSRRGAVESKFNICNYELLNHRIEIVPGVLADECRALICEFYRAPR

SEQ ID NO: 1623 - protein, 164 aa, unidentified
MNELDEIWMREAIRAARAARTLGEVPIGACLIDLEGALLAVAGNRAITLTDPTAHAEILVLREASALIHNYRLVDTTIYSTFEPCTMCAGALVNARIRRLVYGVANSRRGAVRTLFNLCNYQALNHRIEIVAGVLEAECRALVCNFYRKPRDVFNSQKINADQT

SEQ ID NO: 1624 - protein, 142 aa, unidentified
MWRTLHLAREARKLGEVPIGAIIIDLKGKILAATSNRAITLSDPTAHAELMAIRTAGMRIGNYRLNGTTMYSTFEPCVMCAGAIVNARVERLVFGVHNSRRGAVETLFNIGNYRKLPPSAAGFLSRPPRPLRPLCQDPEAPA

SEQ ID NO: 1625 - protein, 165 aa, unidentified
MTHPVPELDQLMQPAIDEARAARTPPRRDIPIGAAVLDEEGRLIASAGNRAEALEDPTAHAEILALREAARVRGRWNLTGCTLASTFEPCTMCAGAIVLARIDHLVVGVMNSKRGAAGSLYNLVREERLNHRVRLTTGVREIECAQMLCGFYRDPRERRKGLRAG

SEQ ID NO: 1626 - protein, 154 aa, unidentified
MSDEAFMQQALALAREARALGEVPVGAVAVLDGRPIGTGFNRAEVLRNPLAHAELLALDEARKALGVWRLTGVTLYSTFEPCAMCAGALVQSRVTRLVFGVMNSKRGAVGSLYNLANYPRHNHRLQVTSGIMADESRLLLCGFYERPREKRRDK

SEQ ID NO: 1627 - protein, 158 aa, unidentified
MATEPDETYMREALELAARARALGEVPVGAVAVLEGRVIGRGFNRAEVLRDPFSHAELLALGEASRALGAWRLSGVTLFSTFEPCAMCAGAMVQARVDRLVFGVRNSKRGAVGSLYNLANYPRHNHRVAVTEGVLAEESGTILCGFYRSPRERRRTSE

SEQ ID NO: 1628 - protein, 174 aa, unidentified
MSEPHPFDAAMREALSLAAEARAAGEVPVGAVAVLGGEVVGRGRNRAEELRDPCAHAELLAIREAARTLGRWRLTGVTLVSTFEPCAMCAGALVLARVDRLVYGVPNSKRGAVGSLMNLSNYPRLNHRFPVERGLRADECGEQLCAFYRSPRATSGASGENSGSSALGSGGEIG

SEQ ID NO: 1629 - protein, 177 aa, unidentified
MSTGTNVHPFDAAMQEAIALADEARRAGEVPVGAVAVLDGKVVGRGRNRAEELRDPCAHAELLALRDAARTLGRWRLTGVTLVSTFEPCAMCAGALVLARVDRLVFGVLNSKRGAVGSLMNLSNYPRLNHRFPVDRGVRGEECAAQLCAFYRLPRASPGGGGENSGSSELGSGGEIG

SEQ ID NO: 1630 - protein, 150 aa, unidentified
MREALALARDARARGEVPVGAVAVLEGRVVGRGANAAEFLRDPTAHAELLAIRDAARTLGRWRLTGVTLVSTFEPCAMCAGAMVLARIDRLVYAVNNSKRGAVGSLLNLSNYPRLNHRFEVVRGVLGDEAGELLCSFYRAPRGGGNGSEG

SEQ ID NO: 1631 - protein, 151 aa, unidentified
MDLPHEHFLDLALEEARRARGEDEVPVGAVAVLEGAVVGRGRNAAERLRDPLAHAELDALREASRNLGRWRLSGVTLYSTFEPCAMCAGAMVNARIERLVYGVDNSKRGAVRSLYNICNYDRLNHRVEVIGGVRAAESSELLCEFYRGPRK

SEQ ID NO: 1632 - protein, 149 aa, unidentified
MGEALDVARRARSMGEVPIGAVVVLDGAVLATAHNRAEILRDPTAHAELLALRQAAGTLGDWRLDGATVYSTFEPCAMCAGAMVLARIAACVYAVPNSKRGFLGTLGNLSNYDGLNHRFGVRAGVRADEASEMLCSFYRGPRGGREGVD

SEQ ID NO: 1633 - protein, 141 aa, unidentified
MDFMSTALELARAARQMGEVPVGAVAVLGGVIIGRGHNRAETLHDPFAHAELLAMREAAQHLRSWRLTDVTVYSTFEPCAMCAGAMAQARLGAVVFGVDNSKRGRADLLVNHNHTVKVTRGVEAEQASVLLCEFYARPRAT

SEQ ID NO: 1634 - protein, 167 aa, unidentified; identical to SEQ ID NO: 1599

SEQ ID NO: 1635 - protein, 167 aa, unidentified
MSVESPVEGVDTADAADAVWMAHALDEARAARAAGDVPVGAVVVLEGVIVGRGRNRAEVLRDQTAHAELVALREAAREPGHWRVEAALFSTFKPCPMCAGAIVNARVRRLVFGVLNSKRGAVTTLYNIPNYPRLNHHVEVVGGIRSEECAALLRAFYAEPRRVFNYR

SEQ ID NO: 1636 - protein, 216 aa, unidentified
AKPAYGVYLYRGFESLPVRNKHSIDFGSVAQWIEHRSTEPGVRGSTPLGSASRRQHMTSPTMTDDQWMHVALSEARAARATGDVPVGAVIVLADGTLLGRGRNRAELLKDPTAHAEIVALREAAHALGMWRVDATIYSTFEPCPMCAGALVNARIARLVYGVPNSKRGAIASLFNIVNYPRLNHRIDVTSGVLSTECAAVLSQFYAEPRRVFNYGT

SEQ ID NO: 1637 - protein, 193 aa, unidentified
MSLAGSRVISMSLERDTETADHAFMGEAIEAARKARAAGDVPVGAVIVLDDEIIAHGHNRAQVLSDPTAHAEIEALRAASRIVGNWRIEGTLYSTFEPCPMCAGALVNARVKRLVYGVSNSKRGSVHTLYNIVNYVRLNHRMEVTAGVRQEECADLLRQFYADPRRVFNTGSHAGDETGHGTDGDPGDSPGGH

SEQ ID NO: 1638 - protein, 189 aa, unidentified
MTSQEWMHEAINCARQARAADEVPIGCVIVLLPTAQIIGRGFNQAETLHDPTAHAEILAMREAGAALNHWRLLDCALISTFEPCPMCAGAIVNARIPKLIYGVDNSKRGAVRTLYNLVNYHVRFTGSPRGKKILDNWDHLIARFYKVMPIEYKRVLEPRRVFNRPRSLLIGPADRSESGPLHTRGVANG

SEQ ID NO: 1639 - protein, 972 aa, unidentified; identical to SEQ ID NO: 1356

SEQ ID NO: 1640 - protein, 972 aa, unidentified
MTDSQNDTDEYWMGEALKLAQKAWDEGEVPVGAILVRKGEVIGHGWNRSIGSHDPSAHAEIMAIREAGVRIGNYRMLDTVLYVTLEPCAMCAGALVHGRISRLVFGAEQPKTGACGSVMDIARHPALNHQLQVDGGVMAAPCARLLSDFFRWRRAQKKAARDNSSGNGTSGGSSGGSSGSETPGTSESATPESSGGSSGGSMERELVLGIAYGGKYTGLAVVDRRHNQVLYANRLKMRDDVAGILKDRRKQRGIRRTAQTKKKRLRELKNYLKSIGYNESTATFETVYSLAHKRGYDYADMPEEKTSEEIEAMDVEERKQWEKEKQEWEETKRNSRHRKEVVKDVHKAMIEGRATEEQIKRVERIFNKQYRPKRFNNRILTKCKVEDCGVNTPLRKNVRDLLIENIVRFFPIEQSEKDNLKDAVLDKNRREEVKSFFRKHKTDEHIRKQVYDIADNKLSGRTVFCKEHILEHTEHSKEERKVFRLAPSLKTKIENVLAVIKDEILPKFTVNKVVMESNNFDIAAKTQGKKRLAKEEYGKGPREGKETRKEALLRETDGRCIYCGKSIDISNAHDDHIFPRKAGGLNIFANLVACCAVCNENKKGRTPLESGISPKPEIIAFMKNDLKKKILEDARNINTVDFNKYMSHASIGWRYMRDRLRESAGNKKLPIERQSGIYTAYFRRWWGFKKERGNTLHHALDAVILASRKGYSDDGLVDMTLKPKYNKGGEFDPEKHLPEPIEFKMDKGSRGSALHDRNPLSYKKGIITRRFMVTEIECGKEDDVISETYREKLKEAFKRFDTKKGKCLTDKEAKEAGFCIKKNELVMSLKCSIKGTGPGQMIRINNNVFKTNVHNVGVDVYLDEKGKKKAYERKNPRLSKHFIEPPPQPNGRVSFTLKRRDMVTVEGEDAIYRIKKLGTSPTIEAVVGSDGKTRTVSATKLTKANSAELEEGADKRTADGSEFESPKKKRKV

SEQ ID NO: 1641 - protein, 972 aa, unidentified; identical to SEQ ID NO: 852

SEQ ID NO: 1642 - protein, 972 aa, unidentified
MTDSQNDTDEYWMGEALKLAQKAWDEGEVPVGAILVRKGEVIGHGWNRSIGSHDPSAHAEIMAIREAGVRIGNYRMLDTVLYVTLEPCAMCAGALVHGRISRLVFGAEQPKTGACGSVMDIARHPALNNQLQVDGGVMAAPCARLLSDFFRWRRAQKKAARDNSSGNGTSGGSSGGSSGSETPGTSESATPESSGGSSGGSMERELVLGIAYGGKYTGLAVVDRRHNQVLYANRLKMRDDVAGILKDRRKQRGIRRTAQTKKKRLRELKNYLKSIGYNESTATFETVYSLAHKRGYDYADMPEEKTSEEIEAMDVEERKQWEKEKQEWEETKRNSRHRKEVVKDVHKAMIEGRATEEQIKRVERIFNKQYRPKRFNNRILTKCKVEDCGVNTPLRKNVRDLLIENIVRFFPIEQSEKDNLKDAVLDKNRREEVKSFFRKHKTDEHIRKQVYDIADNKLSGRTVFCKEHILEHTEHSKEERKVFRLAPSLKTKIENVLAVIKDEILPKFTVNKVVMESNNFDIAAKTQGKKRLAKEEYGKGPREGKETRKEALLRETDGRCIYCGKSIDISNAHDDHIFPRKAGGLNIFANLVACCAVCNENKKGRTPLESGISPKPEIIAFMKNDLKKKILEDARNINTVDFNKYMSHASIGWRYMRDRLRESAGNKKLPIERQSGIYTAYFRRWWGFKKERGNTLHHALDAVILASRKGYSDDGLVDMTLKPKYNKGGEFDPEKHLPEPIEFKMDKGSRGSALHDRNPLSYKKGIITRRFMVTEIECGKEDDVISETYREKLKEAFKRFDTKKGKCLTDKEAKEAGFCIKKNELVMSLKCSIKGTGPGQMIRINNNVFKTNVHNVGVDVYLDEKGKKKAYERKNPRLSKHFIEPPPQPNGRVSFTLKRRDMVTVEGEDAIYRIKKLGTSPTIEAVVGSDGKTRTVSATKLTKANSAELEEGADKRTADGSEFESPKKKRKV

SEQ ID NO: 1643 - protein, 972 aa, unidentified; identical to SEQ ID NO: 843

SEQ ID NO: 1644 - protein, 972 aa, unidentified
MTDSQNGTDGYWMGEALKLAQKAWDEGEVPVGAILVRKGEVIGHGWNRSIGSHDPSAHAEIMAIREAGVRIGNYRMLDTVLYVTLEPCAMCAGALVHGRISRLVFGAEQPKTGACGSVMDIARHPALNHQLQVDGGVMAAPCARLLSDFFRWRRAQKKAARDNSSGNGTSGGSSGGSSGSETPGTSESATPESSGGSSGGSMERELVLGIAYGGKYTGLAVVDRRHNQVLYANRLKMRDDVAGILKDRRKQRGIRRTAQTKKKRLRELKNYLKSIGYNESTATFETVYSLAHKRGYDYADMPEEKTSEEIEAMDVEERKQWEKEKQEWEETKRNSRHRKEVVKDVHKAMIEGRATEEQIKRVERIFNKQYRPKRFNNRILTKCKVEDCGVNTPLRKNVRDLLIENIVRFFPIEQSEKDNLKDAVLDKNRREEVKSFFRKHKTDEHIRKQVYDIADNKLSGRTVFCKEHILEHTEHSKEERKVFRLAPSLKTKIENVLAVIKDEILPKFTVNKVVMESNNFDIAAKTQGKKRLAKEEYGKGPREGKETRKEALLRETDGRCIYCGKSIDISNAHDDHIFPRKAGGLNIFANLVACCAVCNENKKGRTPLESGISPKPEIIAFMKNDLKKKILEDARNINTVDFNKYMSHASIGWRYMRDRLRESAGNKKLPIERQSGIYTAYFRRWWGFKKERGNTLHHALDAVILASRKGYSDDGLVDMTLKPKYNKGGEFDPEKHLPEPIEFKMDKGSRGSALHDRNPLSYKKGIITRRFMVTEIECGKEDDVISETYREKLKEAFKRFDTKKGKCLTDKEAKEAGFCIKKNELVMSLKCSIKGTGPGQMIRINNNVFKTNVHNVGVDVYLDEKGKKKAYERKNPRLSKHFIEPPPQPNGRVSFTLKRRDMVTVEGEDAIYRIKKLGTSPTIEAVVGSDGKTRTVSATKLTKANSAELEEGADKRTADGSEFESPKKKRKV

SEQ ID NO: 1645 - protein, 83 aa, unidentified
ATTATTATTATTAGCATTATTATTATTATAICYTTATTATTATTAGACATTATTATTATTATATTATTATTATTATATTATTA

SEQ ID NO: 1646 - DNA, 90 bp, synthetic construct
  source 1..90: mol_type = other DNA
tcccttgtctccctgttggtccgctgccttgctcgctcgctcgttcgctctttcgatatagaagacacgtcttgctgcgcttgctcttcg

SEQ ID NO: 1647 - DNA, 80 bp, synthetic construct; identical to SEQ ID NO: 1320
  source 1..80: mol_type = other DNA
  modified_base 30^31: mod_base = OTHER; note = iCy55

SEQ ID NO: 1648 - RNA, 110 nt, synthetic construct
  source 1..110: mol_type = other RNA
nnnnnnnnnnnnnnnnnnnnnngttgagaatcgaaagattcttaataaggcatccttccgatgctgacttctcaccgtccgttttccaataggagcgggcggtatgtttt

SEQ ID NO: 1649 - protein, 15 aa, synthetic construct
  source 1..15: note = Linkers evaluated for nMG35-1 fusions with a TadA deaminase
GGGGSGGGGSGGGGS

SEQ ID NO: 1650 - protein, 17 aa, synthetic construct
  source 1..17: note = Linkers evaluated for nMG35-1 fusions with a TadA deaminase; note = XTEN
SGSETPGTSEASTPESA

SEQ ID NO: 1651 - protein, 26 aa, synthetic construct
  source 1..26: note = Linkers evaluated for nMG35-1 fusions with a TadA deaminase
GGGGSGGGGSEAAAAKGGGGSGGGGS

SEQ ID NO: 1652 - protein, 32 aa, synthetic construct
  source 1..32: note = Linkers evaluated for nMG35-1 fusions with a TadA deaminase
GGGGSGGGGSEAAAAKEAAAAKGGGGSGGGGS

SEQ ID NO: 1653 - protein, 44 aa, synthetic construct
  source 1..44: note = Linkers evaluated for nMG35-1 fusions with a TadA deaminase
KGKGKGMGAGTLSTDKGESLGIKYEEGQSHRPTNPNASRMAQKV

SEQ ID NO: 1654 - protein, 7 aa, synthetic construct
  source 1..7: note = Linkers evaluated for nMG35-1 fusions with a TadA deaminase
PAPAPAP

SEQ ID NO: 1655 - protein, 14 aa, synthetic construct
  source 1..14: note = Linkers evaluated for nMG35-1 fusions with a TadA deaminase
KLGGGAPAVGGGPK

SEQ ID NO: 1656 - protein, 25 aa, synthetic construct
  source 1..25: note = SaCas9
MKRNYILGLDIGITSVGYGIIDYET

SEQ ID NO: 1657 - protein, 24 aa, synthetic construct
  source 1..24: note = MG1-4
MKKKVFAFDLGKASIGYCVRDGFN

SEQ ID NO: 1658 - protein, 28 aa, synthetic construct
  source 1..28: note = MG1-6
MEKEKNNHVWGFDIGKGSLGEAVRVGGD

SEQ ID NO: 1659 - protein, 28 aa, synthetic construct
  source 1..28: note = MG3-6
MSTDMKNYRIGVDVGDRSVGLAAIEFDD

SEQ ID NO: 1660 - protein, 27 aa, synthetic construct
  source 1..27: note = MG3-7
MSEHTKYRIGIDVGDRSVGLAAIEFDD

SEQ ID NO: 1661 - protein, 28 aa, synthetic construct
  source 1..28: note = MG3-8
MSTDMKNYRIGVDVGDRSVGLAAIEFDD

SEQ ID NO: 1662 - protein, 28 aa, synthetic construct
  source 1..28: note = QTLQATSYCLGLDVGVQGVGWAVIDLDD
QTLQATSYCLGLDVGVQGVGWAVIDLDD

SEQ ID NO: 1663 - protein, 25 aa, synthetic construct
  source 1..25: note = MG7-1
MSNKTILGLDLGVSSIGWAIIERND

SEQ ID NO: 1664 - protein, 38 aa, synthetic construct
  source 1..38: note = MG14-1
MEITINREIGKLGLPRHLVLGMDPGIASCGFALIDTAN

SEQ ID NO: 1665 - protein, 23 aa, synthetic construct
  source 1..23: note = MG15-1
MNYVLGLDVGIASVGWAVLELNE

SEQ ID NO: 1666 - protein, 24 aa, synthetic construct
  source 1..24: note = MG16-1
MIKNILGLDLGVGSIGWALIQTED

SEQ ID NO: 1667 - protein, 27 aa, synthetic construct
  source 1..27: note = MG18-1
MDQSKEYYIGLDGGTDSVGWAVLNPDY

SEQ ID NO: 1668 - RNA, 22 nt, synthetic construct
  source 1..22: mol_type = other RNA; note = MGA1-4
cgtttgccgtctgaatttgacc

SEQ ID NO: 1669 - RNA, 22 nt, synthetic construct
  source 1..22: mol_type = other RNA; note = MGA1-4
gaagatcaggatatgtggcgga

SEQ ID NO: 1670 - RNA, 22 nt, synthetic construct
  source 1..22: mol_type = other RNA; note = MGA1-4
acgggtaacagtttctttatgg

SEQ ID NO: 1671 - RNA, 22 nt, synthetic construct
  source 1..22: mol_type = other RNA; note = MGA1-6
cgttgctgcataaaccgactac

SEQ ID NO: 1672 - RNA, 22 nt, synthetic construct
  source 1..22: mol_type = other RNA; note = MGA1-6
aaaacccgaaactgtggagcgc

SEQ ID NO: 1673 - RNA, 22 nt, synthetic construct
  source 1..22: mol_type = other RNA; note = MGA1-6
gattgaaaatggtctgctgctg

SEQ ID NO: 1674 - RNA, 22 nt, synthetic construct
  source 1..22: mol_type = other RNA; note = MGA3-6
tacgggtaacagtttctttatg

SEQ ID NO: 1675 - RNA, 22 nt, synthetic construct
  source 1..22: mol_type = other RNA; note = MGA3-6
gcgttggcaatttaaccgccag

SEQ ID NO: 1676 - RNA, 22 nt, synthetic construct
  source 1..22: mol_type = other RNA; note = MGA3-6
ctgaatatcgacggtttccata

SEQ ID NO: 1677 - RNA, 22 nt, synthetic construct
  source 1..22: mol_type = other RNA; note = MGA3-7
cacatttaatgttgatgaaagc

SEQ ID NO: 1678 - RNA, 22 nt, synthetic construct
  source 1..22: mol_type = other RNA; note = MGA3-7
acacaaatcagcgatttccatg

SEQ ID NO: 1679 - RNA, 22 nt, synthetic construct
  source 1..22: mol_type = other RNA; note = MGA3-7
atggatgagcagacgatggtgc

SEQ ID NO: 1680 - RNA, 22 nt, synthetic construct
  source 1..22: mol_type = other RNA; note = MGA3-8
ttcatctgtggtgcaacgggcg

SEQ ID NO: 1681 - RNA, 22 nt, synthetic construct
  source 1..22: mol_type = other RNA; note = MGA3-8
acgagcatcatcctctgcatgg

SEQ ID NO: 1682 - RNA, 22 nt, synthetic construct
  source 1..22: mol_type = other RNA; note = MGA3-8
cgaccccgattgaccctaacgc

SEQ ID NO: 1683 - RNA, 22 nt, synthetic construct
  source 1..22: mol_type = other RNA; note = MGA4-5
cacaaatcagcgatttccatgt

SEQ ID NO: 1684 - RNA, 22 nt, synthetic construct
  source 1..22: mol_type = other RNA; note = MGA4-5
tgatgaagcagaacaactttaa

SEQ ID NO: 1685 - RNA, 21 nt, synthetic construct
  source 1..21: mol_type = other RNA; note = MGA4-5
aatattgaacccacggcatgg

SEQ ID NO: 1686 - RNA, 22 nt, synthetic construct
  source 1..22: mol_type = other RNA; note = MGA7-1
gaagatcaggatatgtggcgga

SEQ ID NO: 1687 - RNA, 22 nt, synthetic construct
  source 1..22: mol_type = other RNA; note = MGA7-1
aacgtcgaaaacccgaaactgt

SEQ ID NO: 1688 - RNA, 22 nt, synthetic construct
  source 1..22: mol_type = other RNA; note = MGA7-1
aaacccacggcatggtgccaat

SEQ ID NO: 1689 - RNA, 22 nt, synthetic construct
  source 1..22: mol_type = other RNA; note = MGA14-1
tcaaaaaatggctttcgctacc

SEQ ID NO: 1690 - RNA, 22 nt, synthetic construct
  source 1..22: mol_type = other RNA; note = MGA14-1
aagcagcgttgttgcagtgcac

SEQ ID NO: 1691 - RNA, 22 nt, synthetic construct
  source 1..22: mol_type = other RNA; note = MGA14-1
tcagccggaaaacctaccggat

SEQ ID NO: 1692 - RNA, 22 nt, synthetic construct
  source 1..22: mol_type = other RNA; note = MGA15-1
gaagatcaggatatgtggcgga

SEQ ID NO: 1693 - RNA, 22 nt, synthetic construct
  source 1..22: mol_type = other RNA; note = MGA15-1
aacgtcgaaaacccgaaactgt

SEQ ID NO: 1694 - RNA, 22 nt, synthetic construct
  source 1..22: mol_type = other RNA; note = MGA15-1
aaacccacggcatggtgccaat

SEQ ID NO: 1695 - RNA, 22 nt, synthetic construct
  source 1..22: mol_type = other RNA; note = MGA16-1
gccagctggcgtaatagcgaag

SEQ ID NO: 1696 - RNA, 22 nt, synthetic construct
  source 1..22: mol_type = other RNA; note = MGA16-1
agggtgaaacgcaggtcgccag

SEQ ID NO: 1697 - RNA, 22 nt, synthetic construct
  source 1..22: mol_type = other RNA; note = MGA16-1
ctacgtctgaacgtcgaaaacc

SEQ ID NO: 1698 - RNA, 22 nt, synthetic construct
  source 1..22: mol_type = other RNA; note = MGA18-1
aaaacccgaaactgtggagcgc

SEQ ID NO: 1699 - RNA, 22 nt, synthetic construct
  source 1..22: mol_type = other RNA; note = MGA18-1
ggcaactctggctcacagtacg

SEQ ID NO: 1700 - RNA, 22 nt, synthetic construct
  source 1..22: mol_type = other RNA; note = MGA18-1
ccggaaaacctaccggattgat

SEQ ID NO: 1701 - RNA, 20 nt, synthetic construct
  source 1..20: mol_type = other RNA; note = ABE8.17m
tttctttcacagatgtggat

SEQ ID NO: 1702 - RNA, 20 nt, synthetic construct
  source 1..20: mol_type = other RNA; note = ABE8.17m
caggatatgtggcggatgat

SEQ ID NO: 1703 - RNA, 20 nt, synthetic construct
  source 1..20: mol_type = other RNA; note = ABE8.17m
tgcgaatacgcccacgcgat

SEQ ID NO: 1704 - RNA, 22 nt, synthetic construct
  source 1..22: mol_type = other RNA; note = MGC1-4
cggcgtttcatctgtggtgcaa

SEQ ID NO: 1705 - RNA, 22 nt, synthetic construct
  source 1..22: mol_type = other RNA; note = MGC1-4
gccaggacagtcgtttgccgtc

SEQ ID NO: 1706 - RNA, 22 nt, synthetic construct
  source 1..22: mol_type = other RNA; note = MGC1-4
tcagccgcgctgtactggaggc

SEQ ID NO: 1707 - RNA, 22 nt, synthetic construct
  source 1..22: mol_type = other RNA; note = MGC1-6
cccttcccaacagttgcgcagc

SEQ ID NO: 1708 - RNA, 22 nt, synthetic construct
  source 1..22: mol_type = other RNA; note = MGC1-6
ctgtcgtcgtcccctcaaactg

SEQ ID NO: 1709 - RNA, 22 nt, synthetic construct
  source 1..22: mol_type = other RNA; note = MGC1-6
ctacgtctgaacgtcgaaaacc

SEQ ID NO: 1710 - RNA, 22 nt, synthetic construct
  source 1..22: mol_type = other RNA; note = MGC3-6
gtgacggcagttatctggaaga

SEQ ID NO: 1711 - RNA, 22 nt, synthetic construct
  source 1..22: mol_type = other RNA; note = MGC3-6
atgatttcagccgcgctgtact

SEQ ID NO: 1712 - RNA, 22 nt, synthetic construct
  source 1..22: mol_type = other RNA; note = MGC3-6
ttactgccgcctgttttgaccg

SEQ ID NO: 1713 - RNA, 22 nt, synthetic construct
  source 1..22: mol_type = other RNA; note = MGC3-7
cgaatggcgctttgcctggttt

SEQ ID NO: 1714 - RNA, 22 nt, synthetic construct
  source 1..22: mol_type = other RNA; note = MGC3-7
tcccctcaaactggcagatgca

SEQ ID NO: 1715 - RNA, 22 nt, synthetic construct
  source 1..22: mol_type = other RNA; note = MGC3-7
atctacaccaacgtgacctatc

SEQ ID NO: 1716 - RNA, 22 nt, synthetic construct
  source 1..22: mol_type = other RNA; note = MGC3-8
ttcatctgtggtgcaacgggcg

SEQ ID NO: 1717 - RNA, 22 nt, synthetic construct
  source 1..22: mol_type = other RNA; note = MGC3-8
acgagcatcatcctctgcatgg

SEQ ID NO: 1718 - RNA, 22 nt, synthetic construct
  source 1..22: mol_type = other RNA; note = MGC3-8
cgacccgcattgaccctaacgc

SEQ ID NO: 1719 - RNA, 22 nt, synthetic construct
  source 1..22: mol_type = other RNA; note = MGC4-5
caacgggcgctgggtcggttac

SEQ ID NO: 1720 - RNA, 22 nt, synthetic construct
  source 1..22: mol_type = other RNA; note = MGC4-5
cacaaatcagcgatttccatgt

SEQ ID NO: 1721 - RNA, 22 nt, synthetic construct
  source 1..22: mol_type = other RNA; note = MGC4-5
aaggcggcggagccgacaccac

SEQ ID NO: 1722 - RNA, 22 nt, synthetic construct
  source 1..22: mol_type = other RNA; note = MGC7-1
gccgatcgcgtcacactacgtc

SEQ ID NO: 1723 - RNA, 22 nt, synthetic construct
  source 1..22: mol_type = other RNA; note = MGC7-1
gatccgcgctggctaccggcga

SEQ ID NO: 1724 - RNA, 22 nt, synthetic construct
  source 1..22: mol_type = other RNA; note = MGC7-1
ccttcccgcccggtgcagtatg

SEQ ID NO: 1725 - RNA, 22 nt, synthetic construct
  source 1..22: mol_type = other RNA; note = MGC14-1
cggtcaatccgccgtttgttcc

SEQ ID NO: 1726 - RNA, 22 nt, synthetic construct
  source 1..22: mol_type = other RNA; note = MGC14-1
tcctttgcgaatacgcccacgc

SEQ ID NO: 1727 - RNA, 22 nt, synthetic construct
  source 1..22: mol_type = other RNA; note = MGC14-1
ggtcggcttacggcggtgattt

SEQ ID NO: 1728 - RNA, 22 nt, synthetic construct
  source 1..22: mol_type = other RNA; note = MGC15-1
gccgatcgcgtcacactacgtc

SEQ ID NO: 1729 - RNA, 22 nt, synthetic construct
  source 1..22: mol_type = other RNA; note = MGC15-1
gatccgcgctggctaccggcga

SEQ ID NO: 1730 - RNA, 22 nt, synthetic construct
  source 1..22: mol_type = other RNA; note = MGC15-1
ccttcccgcccggtgcagtatg

SEQ ID NO: 1731 - RNA, 22 nt, synthetic construct
  source 1..22: mol_type = other RNA; note = MGC16-1
acgtgacctatcccattacggt

SEQ ID NO: 1732 - RNA, 22 nt, synthetic construct
  source 1..22: mol_type = other RNA; note = MGC16-1
atccgccgtttgttcccacgga

SEQ ID NO: 1733 - RNA, 22 nt, synthetic construct
  source 1..22: mol_type = other RNA; note = MGC16-1
cgacggcacgctgattgaagca

SEQ ID NO: 1734 - RNA, 22 nt, synthetic construct
  source 1..22: mol_type = other RNA; note = MGC18-1
tcagccgcgctgtactggaggc

SEQ ID NO: 1735 - RNA, 22 nt, synthetic construct
  source 1..22: mol_type = other RNA; note = MGC18-1
gaccagcccttcccggctgtgc

SEQ ID NO: 1736 - RNA, 22 nt, synthetic construct
  source 1..22: mol_type = other RNA; note = MGC18-1
tccgtttatccgggcaaaccat

SEQ ID NO: 1737 - RNA, 20 nt, synthetic construct
  source 1..20: mol_type = other RNA; note = BE3
cctctggatgtcgctccaca

SEQ ID NO: 1738 - RNA, 20 nt, synthetic construct
  source 1..20: mol_type = other RNA; note = BE3
gggacgcgcgaattgaatta

SEQ ID NO: 1739 - RNA, 20 nt, synthetic construct
  source 1..20: mol_type = other RNA; note = BE3
cgttttacaacgtcgtgact

What is claimed is:

1. An engineered nucleic acid editing system comprising:
(a) a cytosine deaminase or a nucleic acid encoding said cytosine deaminase, wherein said cytosine deaminase comprises a sequence having at least 80% sequence identity to any one of SEQ ID NOs: 774 or 835; and
(b) an endonuclease domain or a nucleic acid encoding said endonuclease domain.

2. The engineered nucleic acid editing system of claim 1, wherein said cytosine deaminase comprises a sequence having at least 90% sequence identity to any one of SEQ ID NOs:
774 or 835.

3. The engineered nucleic acid editing system of claim 2, wherein said cytosine deaminase comprises the sequence of SEQ ID NO: 774.

4. The engineered nucleic acid editing system of claim 2, wherein said cytosine deaminase comprises the sequence of SEQ ID NO: 835.

5. The engineered nucleic acid editing system of claim 1, wherein said endonuclease domain comprises a nickase.

6. The engineered nucleic acid editing system of claim 1, wherein said engineered nucleic acid editing system further comprises one or more of: a uracil DNA glycosylase inhibitor or a nucleic acid encoding said uracil DNA glycosylase inhibitor, or a FAM72A protein or a nucleic acid encoding said FAM72A protein.

7. The engineered nucleic acid editing system of claim 1, further comprising an engineered guide polynucleotide or a nucleic acid encoding said engineered guide polynucleotide, wherein said engineered guide polynucleotide comprises:
i. a guide ribonucleic acid sequence configured to hybridize to a target deoxyribonucleic acid sequence; and
ii. a tracr ribonucleic acid sequence configured to bind to said endonuclease domain.

8. The engineered nucleic acid editing system of claim 2, wherein said engineered nucleic acid editing system comprises said cytosine deaminase and said endonuclease domain.

9. The engineered nucleic acid editing system of claim 8, wherein said engineered nucleic acid editing system comprises a fusion protein.

10. The engineered nucleic acid editing system of claim 9, wherein said cytosine deaminase comprises the sequence of SEQ ID NO: 774.

11. The engineered nucleic acid editing system of claim 9, wherein said cytosine deaminase comprises the sequence of SEQ ID NO: 835.

12. The engineered nucleic acid editing system of claim 7, wherein said guide ribonucleic acid sequence comprises a sequence having at least 80% sequence identity to at least 18 consecutive nucleotides of any one of SEQ ID NOs: 1491-1492.

13. A method of deaminating a cytosine residue in a nucleic acid sequence in a eukaryotic cell, said method comprising contacting to said nucleic acid sequence a polypeptide comprising a cytosine deaminase, wherein said cytosine deaminase comprises a sequence having at least 80% sequence identity to any one of SEQ ID NOs: 774 or 835.

14. The method of claim 13, wherein said cytosine deaminase comprises a sequence having at least 90% sequence identity to any one of SEQ ID NOs: 774 or 835.

15. The method of claim 14, wherein said cytosine deaminase comprises the sequence of SEQ ID NO: 774.

16. The method of claim 14, wherein said cytosine deaminase comprises the sequence of SEQ ID NO: 835.

17. The method of claim 13, wherein said polypeptide is associated with an endonuclease.

18. The method of claim 17, wherein said endonuclease comprises a nickase.

19. The method of claim 13, wherein said eukaryotic cell is a mammalian, primate, or human cell.

20. The method of claim 13, wherein said nucleic acid sequence is a TRAC locus.

21. The method of claim 20, wherein said nucleic acid sequence comprises a sequence having at least 80% sequence identity to at least 18 consecutive nucleotides of any one of SEQ ID NOs: 1491-1492.

22. A method of editing a TRAC locus in a eukaryotic cell, said method comprising contacting said TRAC locus with a polypeptide comprising a cytosine deaminase, wherein said cytosine deaminase comprises a sequence having at least 80% sequence identity to any one any one of SEQ ID NOs: 774 or 835, thereby editing said TRAC locus in said eukaryotic cell.

23. The method of claim 22, wherein said cytosine deaminase comprises a sequence having at least 90% sequence identity to any one of SEQ ID NOs: 774 or 835.

24. The method of claim 23, wherein said cytosine deaminase comprises the sequence of SEQ ID NO: 774.

25. The method of claim 23, wherein said cytosine deaminase comprises the sequence of SEQ ID NO: 835.

26. The method of claim 22, wherein said polypeptide is associated with an endonuclease.

27. The method of claim 26, further comprising contacting said TRAC locus with an engineered guide polynucleotide, wherein said engineered guide polynucleotide is configured to form a complex with said endonuclease and said engineered guide polynucleotide comprises a spacer sequence configured to hybridize to a region of said TRAC locus.

28. The method of claim 27, wherein said spacer sequence comprises a sequence having at least 80% sequence identity to at least 18 consecutive nucleotides of any one of SEQ ID NOs: 1491-1492.

29. The method of claim 26, wherein said endonuclease is a nickase.
